United States Patent Application Publication US 2025/0311734 A1 - sequence listing, part 15

SEQ ID NO: 67030 - protein, 268 aa, Unidentified
QTVPWGITRVQAPAVHNRGITGSGVRVAILDSGISAHSDLNIRGGASFVPGEPTYADLNGHGTHVAGTVAALNNSIGVIGVAPNAELYAVKVLGANGRGSVSGIAQGLEWAATNNMHIANMSLGAEGPSSTLERAVNYATSRDVLVIAATGNNGSGSVGYPARYANAMAVGATDQNNRRANFSQYGTGIDIVAPGVNVQSTYPGNRYVSMNGTSMATPHVAGAAALVKQRYPSWNATQIRNHLKNTATNLGNSSQFGSGLVNAEAATR

SEQ ID NO: 67031 - protein, 268 aa, Unidentified
QTVPWGITRVQAPAVHNRGITGSGVRVAILDSGISAHEDLNIRGGASFVPGEPTTADLNGHGTHVAGTVAALDNSIGVIGVAPNAELYAVKVLGANGRGSVSGIAQGLEWAATNNMHIANMSLGAEGPSSTLERAVNYATSRDVLVIAATGNNGSGSVQYPARYANAMAVGATDQNNQRANFSQYGTGIDIVAPGVNVQSTYPGNRYVSMNGTSMATPHVAGAAALVKQRYPSWNATQIRNHLKNTATNLGNSSQFGSGLVNAEAATR

SEQ ID NO: 67032 - protein, 268 aa, Unidentified
QTVPWGITRVQAPAVHNRGITGSGVRVAILDSGISAHEDLNIRGGASFVPGEPTTADLNGHGTHVAGTVAALDNSIGVVGVAPNAELYAVKVLGANGRGSVSGIAQGLEWAATNNMHIANMSLGAEGPSSTLERAVNYATSRDVLVIAATGNNGSGSVGYPARYANAMAVGATDQNNRRANFSQYGTGIDIVAPGVNVQSTYPGNRYVSMNGTSMATPHVAGAAALVKQRYPSWNATQIRNHLKNTATNLGNSSQFGSGLVNAEAATR

SEQ ID NO: 67033 - protein, 268 aa, Unidentified
QTVPWGITRVQAPAVHNRGITGSGVRVAILDSGISTHEDLNIRGGVSFVPGEPTTADLNGHGTHVAGTVAALNNSIGVVGVAPSADLYAVKVLGANGRGSVSGIAQGLEWAAQNNMHIANMSLGSDAPSSTLERAVNYATSADVLVIAATGNNGSGSVGYPARYANAMAVGATDQNNRRANFSQYGTGIDIVAPGVNVQSTYPGNRYVSMNGTSMATPHVAGAAALVKQRYPSWNATQIRDHLKNTATNLGNSSQFGSGLVNAEAATR

SEQ ID NO: 67034 - protein, 268 aa, Unidentified
QTVPWGITRVQAPAVHNRGITGSGVRVAILDSGISAHEDLNVRGGASFVPGEPTYADLNGHGTHVAGTVAALNNSIGVVGVAPSAELYAVKVLGANGRGSVSGIAQGLEWAAQNNMHIANMSLGSDFPSSTLERAVNYATSRDVLVIAATGNNGSGSVGYPARYANAMAVGATDQNNRRANFSQYGTGIDIVAPGVNVQSTYPGNRYVSMNGTSMATPHVAGAAALVKQRYPSWNATQIRDHLKNTATNLGNSSQFGSGLVNAEAATR

SEQ ID NO: 67035 - protein, 268 aa, Unidentified
QTVPWGITRVQAPAVHNRGITGSGVRVAILDSGISAHSDLNIRGGASFVPGEPTYADLNGHGTHVAGTVAALNNSIGVIGVAPNAELYAVKVLGANGRGSVSGIAQGLEWAAQNNMHIANMSLGTDFPSSTLERAVNYATSRDVLVIAATGNNGSGSVGYPARYANAMAVGATDQNNRRANFSQYGTGIDIVAPGVNVQSTYPGNRYVSMNGTSMATPHVAGAAALVKQRYPSWNATQIRNHLKNTATNLGNSSQFGSGLVNAEAATR

SEQ ID NO: 67036 - protein, 268 aa, Unidentified
QTVPWGITRVQAPAVHNRGITGSGVRVAILDSGISTHEDLNVRGGVSFVPGEPTYADLNGHGTHVAGTVAALNNSIGVVGVAPSADLYAVKVLGANGSGSVSGIAQGLEWAAQNNMHIANMSLGSVTPSSTLERAVNYATSRDVLVIAATGNNGSGSVGYPARYANAMAVGATDQNNRRANFSQYGTGIDIVAPGVNVQSTYPGNRYVSMNGTSMATPHVAGAAALVKQRYPSWNATQIRDHLKNTATNLGNSSQFGSGLVNAEAATR

SEQ ID NO: 67037 - protein, 268 aa, Unidentified
QTVPWGITRVQAPAVHNRGITGSGVRVAILDSGISAHEDLNIRGGASFVPGEPTTADLNGHGTHVAGTVAALNNSIGVIGVAPNAELYAVKVLGANGRGSVSGIAQGLEWAATNNMHIANMSLGAEGPSSTLERAVNYATSRDVLVIAATGNNGSGSVGYPARYANAMAVGATDQNNRRANFSQYGTGIDIVAPGVNIQSTYPGNRYVSMNGTSMATPHVAGAAALVKQRYPSWNATQIRNHLKNTATNLGNSSQFGSGLVNAEAATR

SEQ ID NO: 67038 - protein, 268 aa, Unidentified
QTVPWGITRVQAPAVHNRGITGSGVRVAILDSGISAHEDLNIRGGASFVPGEPTTADLNGHGTHVAGTVAALDNSIGVIGVAPNAELYAVKVLGANGRGSVSGIAQGLEWAATNNMHIANMSLGAEGPSSTLERAVNYATSRDVLVIAATGNNGSGSVQYPARYANAMAVGATDQNNRRANFSQYGTGIDIVAPGVNVQSTYPGNRYVSLSGTSMATPHVAGAAALVKQRYPSWNATQIRNHLKNTATNLGNSSQFGSGLVNAEAATR

SEQ ID NO: 67039 - protein, 268 aa, Unidentified
QTVPWGITRVQAPAVHNRGITGSGVRVAILDSGISTHEDLNVRGGVSFVPGEPTYADLNGHGTHVAGTVAALNNSIGVVGVAPSADLYAVKVLGANGSGSVSGIAQGLEWAAQNNMHIANMSLGSGLPSSTLERAVNYATSRDVLVIAATGNNGSGSVGYPARYANAMAVGATDQNNRRANFSQYGTGIDIVAPGVNVQSTYPGNRYVSMNGTSMATPHVAGAAALVKQRYPSWNATQIRDHLKNTATNLGNSSQFGSGLVNAEAATR

SEQ ID NO: 67040 - protein, 268 aa, Unidentified
QTVPWGITRVQAPAVHNRGITGSGVRVAILDSGISTHEDLNVRGGVSFVPGEPTYADLNGHGTHVAGTVAALNNSIGVIGVAPNAELYAVKVLGANGRGSVSGIAQGLEWAAQNNMHIANMSLGSEGPSSTLERAVNYATSRDVLVIAATGNNGSGSVGYPARYANAMAVGATDQNNRRANFSQYGTGIDIVAPGVNVQSTYPGNRYVSMNGTSMATPHVAGAAALVKQRYPSWNATQIRNHLKNTATNLGNSSQFGSGLVNAEAATR

SEQ ID NO: 67041 - protein, 268 aa, Unidentified
QTVPWGITRVQAPAVHNRGITGSGVRVAILDSGISAHSDLNVRGGVSFVPGEPTYADLNGHGTHVAGTVAALNNSIGVIGVAPNAELYAVKVLGANGSGSVSGIAQGLEWAAQNNMHIANMSLGSDFPSSTLERAVNYATSRDVLVIAATGNNGSGSVGYPARYANAMAVGATDQNNRRANFSQYGTGIDIVAPGVNVQSTYPGNRYVSMNGTSMATPHVAGAAALVKQRYPSWNATQIRNHLKNTATNLGNSSQFGSGLVNAEAATR

SEQ ID NO: 67042 - protein, 268 aa, Unidentified
QTVPWGITRVQAPAVHNRGITGSGVRVAILDSGISAHEDLNVRGGASFVPGEPTTADLNGHGTHVAGTVAALNNSIGVIGVAPNAELYAVKVLGANGRGSVSGIAQGLEWAATNNMHIANMSLGAEGPSSTLERAVNYATSRDVLVIAATGNNGSGSVGYPARYANAMAVGATDQNNRRANFSQYGTGIDIVAPGVNVQSTYPGNRYVSMNGTSMATPHVAGAAALVKQRYPSWNATQIRNHLKNTATNLGNSSQFGSGLVNAEAATR

SEQ ID NO: 67043 - protein, 268 aa, Unidentified
QTVPWGITRVQAPAVHNRGITGSGVRVAILDSGISAHEDLNIRGGASFVPGEPTTADLNGHGTHVAGTVAALDNSIGVIGVAPNAELYAVKVLGANGRGSVSGIAQGLEWAATNNMHIANMSLGAEGPSSTLERAVNYATSRDVLVIAATGNNGSGSVQYPARYANAMAVGATDQNNQRANFSQYGTGIDIVAPGVNVQSTYPGNRYVSLSGTSMATPHVAGAAALVKQRYPSWNATQIRNHLKNTATNLGNSSQFGSGLVNAEAATR

SEQ ID NO: 67044 - protein, 268 aa, Unidentified
QTVPWGITRVQAPAVHNRGITGSGVRVAILDSGISAHEDLNIRGGASFVPGEPTTADLNGHGTHVAGTVAALNNSIGVIGVAPNAELYAVKVLGANGRGSVSGIAQGLEWAATNNMHIANMSLGAEGPSSTLERAVNYATSRDVLVIAATGNNGSGSVGYPARYANAMAVGATDQNNRRANFSQYGTGIDIVAPGVNVQSTYPGNRYVSMNGTSMATPHVAGAAALVKQRYPSWNATQIRDHLKNTATNLGNSSQFGSGLVNAEAATR

SEQ ID NO: 67045 - protein, 268 aa, Unidentified
QTVPWGITRVQAPAVHNRGITGSGVRVAILDSGISTHEDLNVRGGVSFVPGEPTYADLNGHGTHVAGTVAALNNSIGVVGVAPSADLYAVKVLGANGSGSVSGIAQGLEWAAQNNMHIANMSLGVMSPSSTLERAVNYATSRDVLVIAATGNNGSGSVGYPARYANAMAVGATDQNNRRANFSQYGTGIDIVAPGVNVQSTYPGNRYVSMNGTSMATPHVAGAAALVKQRYPSWNATQIRDHLKNTATNLGNSSQFGSGLVNAEAATR

SEQ ID NO: 67046 - protein, 268 aa, Unidentified
QTVPWGITRVQAPAVHNRGITGSGVRVAILDSGISAHEDLNIRGGASFVPGEPTTADLNGHGTHVAGTVAALDNSIGVIGVAPNAELYAVKVLGANGRGSVSGIAQGLEWAATNNMHIANMSLGAEGPSSTLERAVNYATSRDVLVIAATGNNGSGSVGYPARYANAMAVGATDQNNRRANFSQYGTGIDIVAPGVNVQSTYPGNRYVSMNGTSMATPHVAGAAALVKQRYPSWNATQIRNHLKNTATNLGNSSQFGSGLVNAEAATR

SEQ ID NO: 67047 - protein, 268 aa, Unidentified
QTVPWGITRVQAPAVHNRGITGSGVRVAILDSGISAHSDLNIRGGASFVPGEPTTADLNGHGTHVAGTVAALNNDIGVIGVAPNAELYAVKVLGANGSGSVSGIAQGLEWAATNNMHIANMSLGSDFPSSTLERAVNYATSRDRLVIAATGNNGSGSVGYPARYANAMAVGATDQNNRRANFSQYGTGIDIVAPGVNVQSTYPGNRYVSMNGTSMASPHVAGAAALVKQRYPSWNATQIRNHLKNTATNLGNSSQFGSGLVNAEAATR

SEQ ID NO: 67048 - protein, 268 aa, Unidentified
QTVPWGITRVQAPAVHNRGITGSGVRVAILDSGISAHSDLNVRGGVSFVPGEPTTADLNGHGTHVAGTVAALNNSIGVIGVAPNAELYAVKVLGANGSGSVSGIAQGLEWAATNNMHIANMSLGSDFPSSTLERAVNYATSRDVLVIAATGNNGSGSVGYPARYANAMAVGATDQNNRRANFSQYGTGIDIVAPGVNVQSTYPGNRYVSMNGTSMATPHVAGAAALVKQRYPSWNATQIRDHLKNTATNLGNSSQFGSGLVNAEAATR

SEQ ID NO: 67049 - protein, 268 aa, Unidentified
QTVPWGITRVQAPAVHNRGITGSGVRVAILDSGISAHSDLNIRGGASFVPGEPTTADLNGHGTHVAGTVAALNNSIGVIGVAPNAELYAVKVLGANGSGSVSGIAQGLEWAATNNMHIANMSLGSDFPSSTLERAVNYATSRDVLVIAATGNNGSGSVGYPARYQNAMAVGATDQNNRRANFSQYGTGIDIVAPGVNVQSTYPGNRYVSMNGTSMASPHVAGAAALVKQRYPSWNATQIRNHLKNTDTNLGNSSQFGSGLVNAEAATR

SEQ ID NO: 67050 - protein, 268 aa, Unidentified
QTVPWGITRVQAPAVHNRGITGSGVKVAILDSGISAHSDLNIRGGASFVPGEPTTADLNGHGTHVAGTVAALDNSIGVIGVAPNAELYAVKVLGANGRGSISGIAQGLEWAAQNNMHIANMSLGTDAPSSTLERAVNYATSRDVLVIAATGNNGSGSVGYPARYANAMAVGATDQNNRRANFSQYGAGLDIVAPGVNVQSTYPGNRYVSMSGTSMATPHVAGAAALVKQRYPSWNATQIRDHLKNTATNLGNSSQFGSGLVNAEAATR

SEQ ID NO: 67051 - protein, 268 aa, Unidentified
QTVPWGITRVQAPAVHNRGITGSGVRVAILDSGISAHSDLNIRGGASFVPGEPTTADLNGHGTHVAGTVAALNNNIGVIGVAPNAELYAVKVLGANGRGSVSGIAQGLEWAATNNMHIANMSLGSDFPSSTLERAVNYATSRDVLVIAATGNNGSGSVGYPARYANAMAVGATDQNNRRANFSQYGTGIDIVAPGVNVQSTYPGNRYVSMSGTSMATPHVAGAAALVKQRYPSWNATQIRNHLKNTATNLGNSSQFGSGLVNAEAATR

SEQ ID NO: 67052 - protein, 268 aa, Unidentified
QTVPWGITRVQAPAVHNRGITGSGVRVAILDSGISAHSDLNIRGGASFVPGEPTTADLNGHGTHVAGTVAALNNSIGVIGVAPNAELYAVKVLGANGSGSVSGIAQGLEWAATNNMHIANMSMGSDFPSSTLERAVNYATSRDVLVIAATGNNGSGSVGYPARYANAMAVGATDQNNRRANFSQYGTGIDIVAPGVNVQSTYPGNRYVSMNGTSMASPHVAGAAALVKQRYPSWNATQIRNHLKNTDTNLGNSSQFGSGLVNAEAATR

SEQ ID NO: 67053 - protein, 268 aa, Unidentified
QTVPWGITRVQAPTVHNRGITGSGVKVAILDTGIAQHSDLTIRGGASFVPGESTTADLNGHGTHVAGTVAALNNSIGVIGVAPSADLYAVKVLGANGRGSVSGIAQGLEWAATNGMHIANMSLGSDAPSTTLERAVNYATSRGVLVIAATGNNGTGSIGYPARYANAMAVGATDQNNRRASFSQYGTGIDIVAPGVGIQSTYLNNSYASMPGTSMATPHVAGVAALVKQKNPSWNATQIRNHLKNTATNLGNSSQFGSGLVNADAATR

SEQ ID NO: 67054 - protein, 268 aa, Unidentified
QTVPWGITRVQAPTVHNRGITGSGVKVAILDTGIAQHSDLTIRGGASFVPGESTTADLNGHGTHVAGTVAALNNSIGVIGVAPSADLYAVKVLGANGRGSVSGIAQGLEWAATNNMHIANMSLGSDAPSTTLERAVNYATSRGVLVIAATGNNGTGSIGYPARYANAMAVGATDQNNRRASFSQYGTGIDIVAPGVGIQSTYLNNSYASSNGTSMATPHVAGVAALVKQKNPSWNATQIRNHLKNTATNLGNSSQFGSGLVNADAATR

SEQ ID NO: 67055 - protein, 268 aa, Unidentified
QTVPWGITRVQAPAVHNRGITGSGVRVAILDSGISTHEDLNIRGGASFVPGEPTYADLNGHGTHVAGTVAALNNSIGVIGVAPNAELYAVKVLGANGRGSVSGIAQGLEWAAQNNMHIANMSLGTDAPSSTLERAVNYATSRDVLVIAATGNNGSGSVGYPARYANAMAVGATDQNNRRANFSQYGTGIDIVAPGVNVQSTYPGNRYVSMNGTSMATPHVAGAAALVKQRYPSWNATQIRDHLKNTATNLGNSSQFGSGLVNAEAATR

SEQ ID NO: 67056 - protein, 268 aa, Unidentified
QTVPWGITRVQAPAVHNRGITGSGVRVAILDSGISTHEDLNIRGGASFVPGEPTYADLNGHGTHVAGTVAALNNSIGVIGVAPSADLYAVKVLGANGRGSVSGIAQGLEWAAANNMHIANMSLGTDAPSSTLERAVNYATSRDVLVIAATGNNGSGSVGYPARYANAMAVGATDQNNRRANFSQYGTGIDIVAPGVNVQSTYPGNRYVSMNGTSMATPHVAGAAALVKQRYPSWNATQIRDHLKNTATNLGNSSQFGSGLVNAEAATR

SEQ ID NO: 67057 - protein, 268 aa, Unidentified
QTVPWGITRVQAPTVHNRGITGSGVKVAILDTGIAQHSDLTIRGGASFVPGESTTADLNGHGTHVAGTVAALNNSIGVIGVAPSADLYAVKVLGANGRGSVSGIAQGLEWAATNNMHIANMSLGSDSPSTTLERAVNYATSRGVLVIAATGNNGTGSIGYPARYANAMAVGATDQNNRRASFSQYGTGIDIVAPGVGIQSTYLNNSYASMPGTSMATPHVAGVAALVKQKNPSWNATQIRNHLKNTATNLGNSSQFGSGLVNADAATR

SEQ ID NO: 67058 - protein, 268 aa, Unidentified
QTVPWGITRVQAPAVHNRGITGSGVRVAILDSGISTHEDLNVRGGVSFVPGEPTTADLNGHGTHVAGTVAALNNSIGVVGVAPSADLYAVKVLGANGRGSVSGIAQGLEWAAANNMHIASMSLGSDAPSSTLERAVNYATSRDVLVIAATGNNGSGSVGYPARYANAMAVGATDQNNRRANFSQYGTGIDIVAPGVNVQSTYPGNRYVSMNGTSMATPHVAGAAALVKQRYPSWNATQIRNHLKSTATNLGNSNQFGSGLVNAEAATR

SEQ ID NO: 67059 - protein, 268 aa, Unidentified
QTVPWGITRVQAPAVHNRGITGSGVRVAILDSGISAHSDLNIRGGASFVPGEPTTADLNGHGTHVAGTVAALDNSIGVVGVAPNAELYAVKVLGANGRGSISGIAQGLEWAAQNNMHVANMSLGTDAPSSTLERAVNYATSRDVLVIAATGNNGSGTVSYPARYANAMAVGATDQNNRRANFSQYGTGIDIVAPGVNVQSTYPGNRYVSMSGTSMATPHVAGAAALVKQRYPSWNATQIRNHLKNTATNLGNSSQYGSGLVNAEAATR

SEQ ID NO: 67060 - protein, 268 aa, Unidentified
QTVPWGITRVQAPAVHNRGITGSGVRVAILDSGISAHSDLNIRGGASFVPGEPTTADLNGHGTHVAGTVAALDNSIGVVGVAPSADLYAVKVLGANGRGSISGIAQGLEWAAQNNMHIANMSLGSDFPSSTLERAVNYATSADVLVIAATGNNGSGSVGYPARYANAMAVGATDQNNRRANFSQYGTGLDIVAPGVNVQSTYPGNRYVSMNGTSMATPHVAGAAALVKQRYPSWNATQIRDHLKNTATNLGNSSQYGSGLVNAEAATR

SEQ ID NO: 67061 - protein, 268 aa, Unidentified
QTVPWGITRVQAPAVHNRGITGSGVRVAILDSGISAHEDLNIRGGASFVPGEPTTADLNGHGTHVAGTVAALDNSIGVIGVAPRAELYAVKVLGANGRGSVSGIAQGLEWAATNNMHIANMSLGAEGPSSTLERAVNYATSRDVLVIAATGNNGSGSVGYPARYANAMAVGATDQNNQRANFSQYGTGIDIVAPGVNVQSTYPGNRYVSLSGTSMATPHVAGAAALVKQRYPSWNATQIRNHLKNTATNLGNSSQFGSGLVNAEAATR

SEQ ID NO: 67062 - protein, 268 aa, Unidentified
QTVPWGITRVQAPAVHNRGITGSGVRVAILDSGISTHEDLNVRGGVSFVPGEPTYADLNGHGTHVAGTVAALNNSIGVVGVAPSADLYAVKVLGANGSGSVSGIAQGLEWAAQNNMHIANMSLGSNGPSSTLERAVNYATSRDVLVIAATGNNGSGSVGYPARYANAMAVGATDQNNRRANFSQYGTGIDIVAPGVNVQSTYPGNRYVSMNGTSMATPHVAGAAALVKQRYPSWNATQIRDHLKNTATNLGNSSQFGSGLVNAEAATR

SEQ ID NO: 67063 - protein, 268 aa, Unidentified
QTVPWGITRVQAPAVHNRGITGSGVRVAILDSGISAHEDLNIRGGASFVPGEPTTADLNGHGTHVAGTVAALDNSIGVIGVAPNAELYAVKVLGANGRGSVSGIAQGLEWAATNNMHIANMSLGAEGPSSTLERAVNYATSRDVLVIAATGNNGSGSVGYPARYANAMAVGATDQNNRRANFSQYGTGIDIVAPGVNVQSTYPGNRYVSMNGTSMATPHVAGAAALVKQRYPSWNATQIRNHLKNTATNLGNSSEFGSGLVNAEAATR

SEQ ID NO: 67064 - protein, 268 aa, Unidentified
QTVPWGITRVQAPAVHNRGITGSGVKVAILDSGISTHEDLNVRGGVSFVPGEPTYADLNGHGTHVAGTVAALNNSIGVVGVAPSADLYAVKVLGANGRGSVSGIAQGLEWAAQNNMHIANMSLGTDAPSSTLERAVNYATSRDVLVIAATGNNGSGTVSYPARYANAMAVGATDQNNRRANFSQYGTGIDIVAPGVNVQSTYPGNRYVSMNGTSMATPHVAGAAALVKQRYPSWNATQIRDHLKNTATNLGNSSQYGSGLVNAEAATR

SEQ ID NO: 67065 - protein, 268 aa, Unidentified
QTVPWGITRVQAPAVHNRGITGSGVRVAILDSGISAHSDLNIRGGASFVPGEPTTADLNGHGTHVAGTVAALDNSIGVVGVAPSADLYAVKVLGANGRGSISGIAQGLEWAATNNMHIANMSLGSDFPSSTLERAVNYATSRDVLVIAATGNNGSGTIGYPARYANAMAVGATDQNNRRANFSQYGTGIDIVAPGVNVQSTYPGNRYVSMNGTSMATPHVAGAAALVKQRYPSWNATQIRDHLKNTATNLGNSSQYGSGLVNAEAATR

SEQ ID NO: 67066 - protein, 268 aa, Unidentified
QTVPWGITRVQAPTVHNRGITGSGVKVAILDTGIAQHSDLTIRGGASFVPGESTTADLNGHGTHVAGTVAALNNSIGVIGVAPSADLYAVKVLGANGRGSVSGIAQGLEWAATNNMHIANMSLGSPAPSTTLERAVNYATSRGVLVIAATGNNGTGSIGYPARYANAMAVGATDQNNRRASFSQYGTGIDIVAPGVGIQSTYLNNSYASMSGTSMATPHVAGVAALVKQKNPSWNATQIRNHLKNTATNLGNSSQFGSGLVNADAATR

SEQ ID NO: 67067 - protein, 268 aa, Unidentified
QTVPWGITRVQAPAVHNRGITGSGVRVAILDSGISAHEDLNIRGGASFVPGEPTTADLNGHGTHVAGTVAALNNNIGVIGVAPNAELYAVKVLGANGRGSVSGIAQGLEWAATNNMHIANMSLGSDFPSSTLERAVNYATSRDVLVIAATGNNGSGSVGYPARYANAMAVGATDQNNRRANFSQYGTGIDIVAPGVNVQSTYPGNRYVSMSGTSMATPHVAGAAALVKQRYPSWNATQIRNHLKNTATNLGNSSQFGSGLVNAEAATR

SEQ ID NO: 67068 - protein, 268 aa, Unidentified
QTVPWGITRVQAPAVHNRGITGSGVRVAILDSGISAHSDLNIRGGASFVPGEPTTADLNGHGTHVAGTVAALNNDIGVIGVAPNAELYAVKVLGANGSGSVSGIAQGLEWAATNNMHIANMSLGSDFPSSTLERAVNYATSRDVLVIAATGNNGSGSVGYPARYANAMAVGATDQNNRRANFSQYGTGIDIVAPGVNVQSTYPGNRYVSMNGTSMLTPHVAGAAALVKQRYPSWNATQIRNHLKNTDTNLGNSSQFGSGLVNAEAATR

SEQ ID NO: 67069 - protein, 268 aa, Unidentified
QTVPWGITRVQAPAVHNRGITGSGVRVAILDSGISAHEDLNVRGGASFVPGEPTTADLNGHGTHVAGTVAALNNSIGVIGVAPSADLYAVKVLGANGRGSVSGIAQGLEWAAQNNMHIANMSLGSDFPSSTLERAVNYATSRDVLVIAATGNNGSGSVGYPARYANAMAVGATDQNNRRANFSQYGTGIDIVAPGVNVQSTYPGNRYVSMNGTSMATPHVAGAAALVKQRYPSWNATQIRDHLKNTATNLGNSSQFGSGLVNAEAATR

SEQ ID NO: 67070 - protein, 268 aa, Unidentified
QTVPWGITRVQAPAVHNRGITGSGVRVAILDSGISTHEDLNVRGGVSFVPGEPTYADLNGHGTHVAGTVAALNNSIGVVGVAPSADLYAVKVLGANGSGSVSGIAQGLEWAAQNNMHIANMSLGSAVPSSTLERAVNYATSRDVLVIAATGNNGSGSVGYPARYANAMAVGATDQNNRRANFSQYGTGIDIVAPGVNVQSTYPGNRYVSMNGTSMATPHVAGAAALVKQRYPSWNATQIRDHLKNTATNLGNSSQFGSGLVNAEAATR

SEQ ID NO: 67071 - protein, 360 aa, Unidentified
MKIFAKRYSSYAEIGRKLGTWNFNVKTILESDTVDNVEILEKIRKIELELIEEILSDGKLKEGIAYLIFLFQNELYWDEITEVKELRGDFIIYDLHVPGYHNFIAGNMPTVVHNSGVKVAVLDTGISTHPDLNIRGGASFVPGEPSTQDGNGHGTHVAGTIAALNNSIGVLGVAPSAELYAVKVLGASGSGSVSSIAQGLEWAGNNGMHVANLSLGSPSPSATLEQAVNSATSRGVLVVAASGNSGAGSISYPARYANAMAVGATDQNNNRASFSQYGAGLDIVAPGVNVQSTYPGSTYASLNGTSMATPHVAGAAALVKQKNPSWSNVQIRNHLKNTATSLGSTNLYGSGLVNAEAATR

SEQ ID NO: 67072 - protein, 379 aa, Bacillus sp.
MNKKMGKIVAGTALIISVAFSSSIAQAAEEAKEKYLIGFKEQEVMSQFVDQIDGDEYSISSSQVEDVEIDLLHEFDFIPVLSVELDPQDVEALELDPAISYIEEDAEVTTMQTVPWGINRVQAPIAQSRGFTGTGVRVAVLDTGISNHADLRIRGGASFVPGEPNISDGNGHGTHVAGTIAALNNSIGVLGVAPNVDLYGVKVLGASGSGSISGIAQGLQWAANNGMHIANMSLGSSSAGSATMEQAVNQATASGVLVVAASGNSGAGNVGFPARYANAMAVGATDQNNNRASFSQYGAGLDIVAPGVGVQSTVPGNGYSSFNGTSMATPHVAVGAALVKQKNPSWSNVQIRNHLKNTATNLGNTNQFSGLVNAEAATR

SEQ ID NO: 67073 - protein, 268 aa, Unidentified
QTVPWGITRVQAPTVHNRGITGSGVKVAILDTGIAQHSDLTIRGGASFVPGESTTADLNGHGTHVAGTVAALNNSIGVIGVAPSADLYAVKVLGANGRGSVSGIAQGLEWAATNNMHIAMSLGSDAPSTTLERAVNYATSRGVLVIAATGNNGTGSVIGYPARYANAMAVGATDQNNRRASFSQYGTGIDIVAPGVGIQSTYPNNSYASMPGTSMATPHVAGVAALVKQKNPSWNATQIRNHLKNTATNLGNSSQFGSGLVNADAATR

SEQ ID NO: 67074 - protein, 214 aa, Bacillus sp.
QTVPWGIQRVQAPAVINRGINGSGVRVAVLDSGISTHSDLSISGGVSFVPGEPTISDGNGHGTHVAGTIAALNNSIGVVGVAPNAQIYGVKVLGANGRGSVSGIAQGLEWAATNNMDIANLSLGSDAPSSTLEQAVNFATSRGVLVVAASGNNGSGNVGFPARYANAMAVGATDQNNRRANFSQYGAGLDIVAPGVGVQSTYPGNRYVSMNSTS

SEQ ID NO: 67075 - protein, 374 aa, Bacillus sp.
MGKIVAGTALIISVAFSSSIAQAAEEAKEKYLIGFKEQEVMSQFVDQIDGDEYSISSQAEDVEIDLLHEFDFIPVLSVELDPEDVDALELDPAIAYIEEDAEVTTMQTVPWGINRVQAPIAQSRGFTGTGVRVAVLDTGISNHADLRIRGGASFVPGEPNISDGNGHGTHVAGTIAALNNSIGVLGVAPNVDLYGVKVLGADGEGSISGIAQGLQWAANNGMHIANMSLGSSAGSATMEQAVNQATASGVLVVAASGNSGAGNVGFPARYANAMAVGATDQNNNRASFSQYGAGLDIVAPGVGVQSTVPGNGYASFNGTSMATPHVAGVAALVKQKNPSWSNVQIRNHLKNTATNLGNTTQFGSGLVNAEAATR

SEQ ID NO: 67076 - protein, 378 aa, Bacillus sp.
MNKKMGKIVAGTALIISVAFSSSIAQAAEEAKEKYLIGFKEQEVMSQFVDQIDGDEYSISSQAEDVEIDLLHEFDFIPVLSVELDPEDVDALELDPAIAYIEEDAEVTTMQTVPWGINRVQAPIAQSRGFTGTGVRVAVLDTGISNHADLRIRGGASFVPGEPNISDGNGHGTQVAGTIAALNNSIGVLGVAPNVDLYGVKVLGASGSGSISGIAQGLQWAANNGMHIANMSLGSSAGSATMEQAVNQATASGVLVVAASGNSGAGNVGFPARYANAMAVGATDQNNNRATFSQYGAGLDIVAPGVGVQSTVPGNGYASFNGTSMATPHVAGVAALVKQKNPSWSNVQIRNHLKNTATNLGNTTQFGSGLVNAEAATR

SEQ ID NO: 67077 - protein, 268 aa, Unidentified
QTVPWGITRVQAPTVHNRGITGSGVKVAILDTGIAQHSDLTIRGGASFVPGESTTADLNGHGTHVAGTVAALNNSIGVIGVAPSADLYAVKVLGANGRGSVSGIAQGLEWAATNNMHIANMSLGSDAPSTTLERAVNYATSRGVLVIAATGNNGTGSIGYPARYANAMAVGATDQNNRRASFSQYGTGIDIVAPGVGIQSTYLNNSYASMHGTSMATPHVAGVAALVKQKNPSWNATQIRNHLKNTATNLGNSSQFGSGLVNADAATR

SEQ ID NO: 67078 - protein, 268 aa, Unidentified
QTVPWGITRVQAPAVHNRGITGSGVRVAILDSGISTHEDLNVRGGVSFVPGEPTYADLNGHGTHVAGTVAALNNSIGVIGVAPNAELYAVKVLGANGRGSVSGIAQGLEWAATNNMHIANMSLGAEGPSSTLERAVNYATSRDVLVIAATGNNGSGSVGYPARYANAMAVGATDQNNRRANFSQYGTGIDIVAPGVNVQSTYPGNRYVSMNGTSMATPHVAGAAALVKQRYPSWNATQIRNHLKNTATNLGNSSQFGSGLVNAEAATR

SEQ ID NO: 67079 - protein, 268 aa, Unidentified
QTVPWGITRVQAPAVHNRGITGSGVRVAILDSGISAHEDLNVRGGVSFVPGEPTTADLNGHGTHVAGTVAALNNSIGVIGVAPNAELYAVKVLGANGRGSVSGIAQGLEWAAQNNMHIANMSLGSDFPSSTLERAVNYATSRDVLVIAATGNNGSGSVGYPARYANAMAVGATDQNNRRANFSQYGTGIDIVAPGVNVQSTYPGNRYVSMNGTSMATPHVAGAAALVKQRYPSWNATQIRDHLKNTATNLGNSSQFGSGLVNAEAATR

SEQ ID NO: 67080 - protein, 268 aa, Unidentified
QTVPWGITRVQAPAVHNRGITGSGVRVAILDSGISAHEDLNIRGGASFVPGEPTTADLNGHGTHVAGTVAALDNSIGVIGVAPNAELYAVKVLGANGRGSVSGIAQGLEWAATNNMHIANMSLGAEGPSSTLERAVNYATSRDVLVIAATGNNGSGSVGYPARYANAMAVGATDQNNRRANFSQYGTGIDIVAPGVNVLSTYPGNRYVSMNGTSMATPHVAGAAALVKQRYPSWNATQIRNHLKNTATNLGNSSEFGSGLVNAEAATR

SEQ ID NO: 67081 - protein, 268 aa, Unidentified
QVVPWGIERVQAPTVHNRGITGSGVKVAILDTGIAQHEDLTIRGGASFVPGESTTADLNGHGTHVAGTVAALNNSIGVIGVAPSADLYAVKVLGANGRGSVSGIAQGLEWAATNNMHIANMSLGSDAPSTTLERAVNYATSRGVLVIAATGNNGTGSIGYPARYANAMAVGATDQNNRRASFSQYGTGIDIVAPGVGIQSTYLNNSYASMPGTSMATPHVAGVAALVKQKNPSWNATQIRNHLKNTATNLGNSSQFGSGLVNADAATR

SEQ ID NO: 67082 - protein, 268 aa, Unidentified
QTVPWGITRVQAPTVHNRGQTGSGVKVAILDTGIAQHSDLTIRGGASFVPGESTTADLNGHGTHVAGTVAALNNSIGVIGVAPSADLYAVKVLGANGRGSVSGIAQGLEWAATNNMHIANMSLGSDAPSTTLERAVNYATSRGVLVIAATGNNGTGSIGYPARYANAMAVGATDQNNRRASFSQYGTGIDIVAPGVGIQSTYLNNSYASMPGTSMATPHVAGVAALVKQKNPSWNATQIRNHLKNTATNLGNSSQFGSGLVNADAATR

SEQ ID NO: 67083 - protein, 268 aa, Unidentified
QTVPWGITRVQAPTVHNRGGTGSGVKVAILDTGIAQHSDLTIRGGASFVPGESTTADLNGHGTHVAGTVAALNNSIGVIGVAPSADLYAVKVLGANGRGSVSGIAQGLEWAATNNMHIANMSLGSDAPSTTLERAVNYATSRGVLVIAATGNNGTGSIGYPARYANAMAVGATDQNNRRASFSQYGTGIDIVAPGVGIQSTYLNNSYASMPGTSMATPHVAGVAALVKQKNPSWNATQIRNHLKNTATNLGNSSQFGSGLVNADAATR

SEQ ID NO: 67084 - protein, 268 aa, Unidentified
QTVPWGITRVQAPTVHNRGITGSGVKVAILDTGIAQHSDLTIRGGASFVPGESTTADLNGHGTHVAGTVAALNNSIGVIGVAPSADLYAVKVLGANGRGSVSGIAQGLEWAATNRMHIANMSLGSDAPSTTLERAVNYATSRGVLVIAATGNNGTGSIGYPARYANAMAVGATDQNNRRASFSQYGTGIDIVAPGVGIQSTYLNNSYASMPGTSMATPHVAGVAALVKQKNPSWNATQIRNHLKNTATNLGNSSQFGSGLVNADAATR

SEQ ID NO: 67085 - protein, 268 aa, Unidentified
QTVPWGITRVQAPAVHNRGITGSGVRVAILDSGISTHEDLNVRGGVSFVPGEPTTADLNGHGTHVAGTVAALNNSIGVVGVAPSADLYAVKVLGANGRGSVSGIAQGLEWAAANNMHIANMSLGTDAPSSTLERAVNYATSRDVLVIAATGNNGSGSVGYPARYANAMAVGATDQNNRRANFSQYGTGIDIVAPGVNVQSTYPGNRYVSMNGTSMATPHVAGAAALVKQRYPSWNTTQIRDHLKNTATNLGNSSQFGSGLVNAEAATR

SEQ ID NO: 67086 - protein, 268 aa, Unidentified
QVVPWGITRVQAPTVHNRGITGSGVKVAILDTGIAQHEDLTIRGGASFVPGESTTADLNGHGTHVAGTVAALNNSIGVIGVAPSADLYAVKVLGANGRGSVSGIAQGLEWAATNNMHIANMSLGSDAPSTTLERAVNYATSRGVLVIAATGNNGTGSIGYPARYANAMAVGATDQNNRRASFSQYGTGIDIVAPGVGIQSTYLNNSYASMPGTSMATPHVAGVAALVKQKNPSWNATQIRNHLKNTATNLGPSSQFGSGLVNADAATR

SEQ ID NO: 67087 - protein, 268 aa, Unidentified
QTVPWGITRVQAPAVHNRGITGSGVRVAILDSGISAHEDLNIRGGASFVPGEPTTADLNGHGTHVAGTVAALDNSIGVIGVAPRAELYAVKVLGANGRGSVSGIAQGLEWAATNRMHIANMSLGAEGPSSTLERAVNYATSRDVLVIAATGNNGSGSVGYPARYANAMAVGATDQNNRRANFSQYGTGIDIVAPGVNVLSTYPGNRYVSMNGTSMATPHVAGAAALVKQRYPSWNATQIRNHLKNTATNLGNSSEFGSGLVNAEAATR

SEQ ID NO: 67088 - protein, 268 aa, Unidentified
QTVPWGITRVQAPTVHNRGETGSGVKVAILDTGIAQHSDLTIRGGASFVPGESTTADLNGHGTHVAGTVAALNNSIGVIGVAPSADLYAVKVLGANGRGSVSGIAQGLEWAATNNMHIANMSLGSDAPSTTLERAVNYATSRGVLVIAATGNNGTGSIGYPARYANAMAVGATDQNNRRASFSQYGTGIDIVAPGVGIQSTYLNNSYASMPGTSMATPHVAGVAALVKQKNPSWNATQIRNHLKNTATNLGNSSQFGSGLVNADAATR

SEQ ID NO: 67089 - protein, 268 aa, Unidentified
QVVPWGITRVQAPTVHNRGITGSGVKVAILDTGIAQHSDLTIRGGASFVPGESTTADLNGHGTHVAGTVAALNNSIGVIGVAPSADLYAVKVLGANGRGSVSGIAQGLEWAATNNMHIANMSLGSDAPSTTLERAVNYATSRGVLVIAATGNNGTGSIQYPARYANAMAVGATDQNNRRASFSQYGTGIDIVAPGVGIQSTYLNNSYASMPGTSMATPHVAGVAALVKQKNPSWNATQIRNHLKNTATNLGNSSQFGSGLVNADAATR

SEQ ID NO: 67090 - protein, 268 aa, Unidentified
QVVPWGITRVQAPTVHNRGITGSGVKVAILDTGIAQHSDLTIRGGASFVPGESTTADLNGHGTHVAGTVAALNNSIGVIGVAPSADLYAVKVLGANGRGSVSGIAQGLEWAATNNMHIANMSLGSDAPSTTLERAVNYATSRGVLVIAATGNNGTGSIGYPARYANAMAVGATDQNNRRASFSQYGTGIDIVAPGVGIQSTYLNNSYASMSGTSMATPHVAGVAALVKQKNPSWNATQIRNHLKNTATNLGPSSQFGSGLVNADAATR

SEQ ID NO: 67091 - protein, 268 aa, Unidentified
QTVPWGITRVQAPAVHNRGITGSGVRVAILDSGISAHEDLNIRGGASFVPGEPTTADLNGHGTHVAGTVAALDNSIGVIGVAPNAELYAVKVLGANGRGSVSGIAQGLEWAATNNMHIANMSLGAEGPSSTLERAVNYATSRDVLVIAATGNNGSGSVQYPARYANAMAVGATDQNNQRANFSQYGTGIDIVAPGVNVQSTYPGNRYVSMSGTSMATPHVAGAAALVKQRYPSWNATQIRNHLKNTATNLGNSSQFGSGLVNAEAATR

SEQ ID NO: 67092 - protein, 268 aa, Unidentified
QTVPWGIERVQAPTVHNRGITGSGVKVAILDTGIAQHSDLTIRGGASFVPGESTTADLNGHGTHVAGTVAALNNSIGVIGVAPSADLYAVKVLGANGRGSVSGIAQGLEWAATNNMHIANMSLGSDAPSTTLERAVNYATSRGVLVIAATGNNGTGSIGYPARYANAMAVGATDQNNRRASFSQYGTGIDIVAPGVGIQSTYLNNSYASMSGTSMATPHVAGVAALVKQKNPSWNATQIRNHLKNTATNLGNSSQFGSGLVNADAATR

SEQ ID NO: 67093 - protein, 268 aa, Unidentified
QTVPWGITRVQAPAVHNRGITGSGVRVAILDSGISTHEDLNVRGGVSFVPGEPTYADLNGHGTHVAGTVAALNNSIGVIGVAPNAELYAVKVLGANGRGSVSGIAQGLEWAAQNNMHIANMSLGAEGPSSTLERAVNYATSRDVLVIAATGNNGSGSVGYPARYANAMAVGATDQNNRRANFSQYGTGIDIVAPGVNVQSTYPGNRYVSMNGTSMATPHVAGAAALVKQRYPSWNATQIRNHLKNTATNLGNSSQFGSGLVNAEAATR

SEQ ID NO: 67094 - protein, 268 aa, Unidentified
QTVPWGITRVQAPAVHNRGITGSGVRVAILDSGISTHEDLNVRGGVSFVPGEPTYADLNGHGTHVAGTVAALNNSIGVVGVAPSADLYAVKVLGANGRGSVSGIAQGLEWAAQNNMHIANMSLGAEGPSSTLERAVNYATSRDVLVIAATGNNGSGSVGYPARYANAMAVGATDQNNRRANFSQYGTGIDIVAPGVNVQSTYPGNRYVSMNGTSMATPHVAGAAALVKQRYPSWNATQIRNHLKNTATNLGNSSQFGSGLVNAEAATR

SEQ ID NO: 67095 - protein, 268 aa, Unidentified
QTVPWGITRVQAPAVHNRGITGSGVRVAILDSGISTHEDLNIRGGVSFVPGEPTTADLNGHGTHVAGTVAALNNSIGVVGVAPSADLYAVKVLGANGRGSISGIAQGLEWAAQNNMHIANMSLGSDAPSSTLERAVNYATSADVLVIAATGNNGSGSVGYPARYANAMAVGATDQNNRRANFSQYGTGIDIVAPGVNVQSTYPGNRYVSMNGTSMATPHVAGAAALVKQRYPSWNATQIRDHLKNTATNLGNSSQFGSGLVNAEAATR

SEQ ID NO: 67096 - protein, 268 aa, Unidentified
QTVPWGITRVQAPAVHNRGITGSGVRVAILDSGISTHEDLNVRGGVSFVPGEPTYADLNGHGTHVAGTVAALNNSIGVVGVAPSADLYAVKVLGANGSGSVSGIAQGLEWAAQNNMHIANMSLGGAGPSSTLERAVNYATSRDVLVIAATGNNGSGSVGYPARYANAMAVGATDQNNRRANFSQYGTGIDIVAPGVNVQSTYPGNRYVSMNGTSMATPHVAGAAALVKQRYPSWNATQIRDHLKNTATNLGNSSQFGSGLVNAEAATR

SEQ ID NO: 67097 - protein, 268 aa, Unidentified
QTVPWGITRVQAPAVHNRGITGSGVRVAILDSGISTHEDLTIRGGVSFVPGEPGTADLNGHGTHVAGTVAALNNSIGVVGVAPSADLYAVKVLGANGRGSVSGIAQGLEWAAQNNMHIANMSLGSDAPSSTLERAVNYATSRDVLVIAATGNNGSGSVGYPARYANAMAVGATDQNNRRANFSQYGTGIDIVAPGVNVQSTYPGNRYVSMSGTSMATPHVAGAAALVKQRYPSWNATQIRDHLKNTATNLGNSSQFGSGLVNAEAATR

SEQ ID NO: 67098 - protein, 268 aa, Unidentified
QTVPWGITRVQAPTVHNRGITGSGVKVAILDTGIAQHSDLTIRGGASFVPGESTTADLNGHGTHVAGTVAALNNSIGVIGVAPSAGLYAVKVLGANGRGSVSGIAQGLEWAATNNMHIANMSLGSDAPSTTLERAVNYATSRGVLVIAATGNNGTGSIGYPARYANAMAVGATDQNNRRASFSQYGTGIDIVAPGVGIQSTYLNNSYASMPGTSMATPHVAGVAALVKQKNPSWNATQIRNHLKNTATNLGNSSQFGSGLVNADAATR

SEQ ID NO: 67099 - protein, 268 aa, Unidentified
QTVPWGITRVQAPAVHNRGITGSGVRVAILDSGISAHSDLNIRGGASFVPGEPTYADLNGHGTHVAGTVAALNNSIGVIGVAPNAELYAVKVLGANGRGSVSGIAQGLEWAAQNNMHIANMSLGTDFPSSTLERAVNYATSRDVLVIAATGNNGSGSVGYPARYANAMAVGATDQNNRRANFSQYGTGIDIVAPGVNVQSTYPGNRYVSMNGTSMATPHVAGAAALVKQRYPSWNATQIRDHLKNTATNLGNSSQFGSGLVNAEAATR

SEQ ID NO: 67100 - protein, 268 aa, Unidentified
QTVPWGITRVQAPAVHNRGITGSGVRVAILDSGISTHEDLNIRGGASFVPGEPTTADLNGHGTHVAGTVAALDNSIGVVGVAPSADLYAVKVLGANGRGSISGIAQGLEWAAQNNMHIANMSLGTDAPSSTLERAVNYATSADVLVIAATGNNGSGSVGYPARYANAMAVGATDQNNRRANFSQYGTGIDIVAPGVNVQSTYPGNRYVSMNGTSMATPHVAGAAALVKQRYPSWNATQIRNHLKNTATNLGNSSQFGSGLVNAEAATR

SEQ ID NO: 67101 - protein, 268 aa, Bacillus sp.
QTVPWGITRVQAPTVHNRGVTGSGVKVAILDTGIAQHSDLTIRGGASFVPGESTTADLNGHGTHVAGTVAALNNSIGVIGVAPSADLYAVKVLGANGRGSVSGIAQGLEWAATNNMHIANMSLGSDAPSTTLERAVNYATSRGVLVIAATGNNGTGSIGYPARYANAMAVGATDQNNRRASFSQYGTGIDIVAPGVGIQSTYLNNSYASMPGTSMATPHVAGVAALVKQKNPSWNATQIRNHLKNTATNLGNSSQFGSGLVNADAATR

SEQ ID NO: 67102 - protein, 268 aa, Unidentified
QTVPWGITRVQAPTVHNRGITGSGVKVAILDTGIAQHSDLTIRGGASFVPGESTTADLNGHGTHVAGTVAALNNSIGVIGVAPSAWLYAVKVLGANGRGSVSGIAQGLEWAATNNMHIANMSLGSDAPSTTLERAVNYATSRGVLVIAATGNNGTGSIGYPARYANAMAVGATDQNNRRASFSQYGTGIDIVAPGVGIQSTYLNNSYASMPGTSMATPHVAGVAALVKQKNPSWNATQIRNHLKNTATNLGNSSQFGSGLVNADAATR

SEQ ID NO: 67103 - protein, 268 aa, Unidentified
QTVPWGITRVQAPAVHNRGITGSGVRVAILDSGISAHSDLNIRGGASFVPGEPTTADLNGHGTHVAGTVAALDNSIGVVGVAPSADLYAVKVLGANGRGSISGIAQGLEWAATNNMHIANMSLGTDAPSSTLERAVNYATSADVLVIAATGNNGSGSVGYPARYANAMAVGATDQNNRRANFSQYGTGLDIVAPGVNVQSTYPGNRYVSMNGTSMATPHVAGAAALVKQRYPSWNATQIRDHLKNTATNLGNSSQYGSGLVNAEAATR

SEQ ID NO: 67104 - protein, 268 aa, Unidentified
QTVPWGITRVQAPAVHNRGITGSGVRVAILDSGISTHEDLNVRGGVSFVPGEPTYADLNGHGTHVAGTVAALNNSIGVVGVAPSADLYAVKVLGANGSGSVSGIAQGLEWAAQNNMHIANMSLGAEGPSSTLERAVNYATSRDVLVIAATGNNGSGSVGYPARYANAMAVGATDQNNRRANFSQYGTGIDIVAPGVNVQSTYPGNRYVSMNGTSMATPHVAGAAALVKQRYPSWNATQIRDHLKNTATNLGNSSQFGSGLVNAEAATR

SEQ ID NO: 67105 - protein, 268 aa, Unidentified
QTVPWGITRVQAPAVHNRGITGSGVRVAILDSGISTHEDLNVRGGVSFVPGETTYADLNGHGTHVAGTVAALNNSIGVLGVAPSADLYAVKVLGANGRGSVSGIAQGLEWAAQNNMHIANMSLGAEGPSSTLERAVNYATSRDVLVIAATGNNGSGSVGYPARYANAMAVGATDQNNRRANFSQYGTGIDIVAPGVNVQSTYPGNRYVSMNGTSMATPHVAGAAALVKQRYPSWNATQIRNHLKNTATNLGNSSQFGSGLVNAEAATR

SEQ ID NO: 67106 - protein, 268 aa, Unidentified
QTVPWGITRVQAPTVHNRGITGSGVKVAILDTGIAQHSDLTIRGGASFVPGESTTADLNGHGTHVAGTVAALNNSIGVIGVAPSADLYAVKVLGANGRGSVSGIAQGLEWAATNNMHIANMSLGSDAPSTTLERAVNYATSRGVLVIAATGNNGTGSIQYPARYANAMAVGATDQNNQRASFSQYGTGIDIVAPGVGIQSTYLNNSYASMSGTSMATPHVAGVAALVKQKNPSWNATQIRNHLKNTATNLGNSSQFGSGLVNADAATR

SEQ ID NO: 67107 - protein, 268 aa, Unidentified
QTVPWGIERVQAPTVHNRGITGSGVKVAILDTGIAQHSDLTIRGGASFVPGESTTADLNGHGTHVAGTVAALNNSIGVIGVAPSADLYAVKVLGANGRGSVSGIAQGLEWAATNNMHIANMSLGSDAPSTTLERAVNYATSRGVLVIAATGNNGTGSIGYPARYANAMAVGATDQNNRRASFSQYGTGIDIVAPGVGIQSTYLNNSYASMPGTSMATPHVAGVAALVKQKNPSWNATQIRNHLKNTATNLGNSSQFGSGLVNADAATR

SEQ ID NO: 67108 - protein, 268 aa, Unidentified
QTVPWGITRVQAPTVHNRGITGSGVKVAILDTGIAQHSDLTIRGGASFVPGESTTADLNGHGTHVAGTVAALNNSIGVIGVAPSADLYAVKVLGANGRGSVSGIAQGLEWAATNNMHIANMSLGSDAPSTTLERAVNYATSRGVLVIAATGNNGTGSIGYPARYANAMAVGATDQNNQRASFSQYGTGIDIVAPGVGIQSTYLNNSYASMSGTSMATPHVAGVAALVKQKNPSWNATQIRNHLKNTATNLGNSSQFGSGLVNADAATR

SEQ ID NO: 67109 - protein, 268 aa, Unidentified
QTVPWGITRVQAPAVHNRGITGSGVKVAILDSGISTHEDLNIRGGASFVPGEPGYADLNGHGTHVAGTVAALDNSIGVIGVAPNAELYAVKVLGANGRGSISGIAQGLEWAATNNMHIANMSLGTDAPSSTLERAVNYATSRDVLVIAATGNNGSGSVGYPARYANAMAVGATDQNNRRANFSQYGTGIDIVAPGVNVQSTYPGNRYVSMNGTSMATPHVAGAAALVKQRYPSWNATQIRDHLKNTATNLGNSSQFGSGLVNAEAATR

SEQ ID NO: 67110 - protein, 268 aa, Unidentified
QTVPWGITRVQAPAVHNRGITGSGVRVAILDSGISTHEDLNVRGGVSFVPGEPTYADLNGHGTHVAGTVAALNNSIGVVGVAPSADLYAVKVLGANGMGSVSGIAQGLEWAAQNNMHIANMSLGEASPSSTLERAVNYATSRDVLVIAATGNNGSGSVGYPARYANAMAVGATDQNNRRANFSQYGTGIDIVAPGVNVQSTYPGNRYVSMNGTSMATPHVAGAAALVKQRYPSWNATQIRDHLKNTATNLGNSSQFGSGLVNAEAATR

SEQ ID NO: 67111 - protein, 268 aa, Unidentified
QVVPWGITRVQAPTVHNRGITGSGVKVAILDTGIAQHSDLTIRGGASFVPGESTTADLNGHGTHVAGTVAALNNSIGVIGVAPSADLYAVKVLGANGRGSVSGIAQGLEWAATNNMHIANMSLGSDAPSTTLERAVNYATSRGVLVIAATGNNGTGSIGYPARYANAMAVGATDQNNQRASFSQYGTGIDIVAPGVGIQSTYLNNSYASMPGTSMATPHVAGVAALVKQKNPSWNATQIRNHLKNTATNLGPSSQFGSGLVNADAATR

SEQ ID NO: 67112 - protein, 268 aa, Unidentified
QTVPWGIERVQAPTVHNRGITGSGVKVAILDTGIAQHSDLTIRGGASFVPGESTTADLNGHGTHVAGTVAALNNSIGVIGVAPSADLYAVKVLGANGRGSVSGIAQGLEWAATNNMHIANMSLGSDAPSTTLERAVNYATSRGVLVIAATGNNGTGSIGYPARYANAMAVGATDQNNQRASFSQYGTGIDIVAPGVGIQSTYLNNSYASMPGTSMATPHVAGVAALVKQKNPSWNATQIRNHLKNTATNLGNSSQFGSGLVNADAATR

SEQ ID NO: 67113 - protein, 268 aa, Unidentified
QTVPWGITRVQAPAVHNRGITGSGVRVAILDSGISTHEDLNVRGGVSFVPGEPTYADLNGHGTHVAGTVAALNNSIGVVGVAPSADLYAVKVLGANGRGSVSGIAQGLEWAAQNNMHVANMSLGTDAPSSTLERAVNYATSRDVLVIAATGNNGSGSVGYPARYANAMAVGATDQNNRRANFSQYGTGIDIVAPGVNVQSTYPGNRYVSMNGTSMATPHVAGAAALVKQRYPSWNATQIRDHLKNTATNLGNSSQFGSGLVNAEAATR

SEQ ID NO: 67114 - protein, 268 aa, Unidentified
QTVPWGITRVQAPTVHNRGITGSGVKVAILDTGIAQHSDLTIRGGASFVPGESTTADLNGHGTHVAGTVAALNNSIGVIGVAPSADLYAVKVLGANGRGSVSGIAQGLEWAATNNMHIANMSLGSDGPSTTLERAVNYATSRGVLVIAATGNNGTGSIGYPARYANAMAVGATDQNNRRASFSQYGTGIDIVAPGVGIQSTYLNNSYASMPGTSMATPHVAGVAALVKQKNPSWNATQIRNHLKNTATNLGNSSQFGSGLVNADAATR

SEQ ID NO: 67115 - protein, 268 aa, Bacillus gibsonii
QTVPWGITRVQAPTVHNRGITGSGVKVAILDTGIAQHSDLTIRGGASFVPGESTTADLNGHGTHVAGTVAALNNSIGVIGVAPSADLYAVKVLGAFGLGSVSGIAQGLEWAATNNMHIANMSLGSDAPSTTLERAVNYATSRGVLVIAATGNNGTGSIGYPARYANAMAVGATDQNNRRASFSQYGPGIDIVAPGVGIQSTYLNNSYKSLDGTSMATPHVAGVAALVKQKNPSWNATQIRNHLKNTATNLGNSSQFGSGLVNADAATR

SEQ ID NO: 67116 - protein, 268 aa, Unidentified
QTVPWGITRVQAPAVHNRGITGSGVRVAILDSGISTHEDLNVRGGVSFVPGEPTYADLNGHGTHVAGTVAALNNSIGVVGVAPSADLYAVKVLGANGRGSVSGIAQGLEWAAQNNMHIANLSLGAEGPSSTLERAVNYATSRDVLVIAATGNNGSGSVGYPARYANAMAVGATDQNNRRANFSQYGTGIDIVAPGVNVQSTYPGNRYVSMNGTSMATPHVAGAAALVKQRYPSWNATQIRDHLKNTATNLGNSSQFGSGLVNAEAATR

SEQ ID NO: 67117 - protein, 268 aa, Unidentified
QTVPWGITRVQAPAVHNRGITGSGVRVAILDSGISTHEDLNVRGGVSFVPGEPTTADLNGHGTHVAGTVAALNNSIGVVGVAPSADLYAVKVLGANGRGSVSGIAQGLEWAAANNMHIANMSLGTDAPSSTLERAVNYATSRDVLVIAATGNNGSGSVGYPARYANAMAVGATDQNNRRANFSQYGTGIDIVAPGVNVQSTYPGNRYVSMSGTSMATPHVAGAAALVKQRYPSWNATQIRNHLKNTATNLGNSSQFGSGLVNAEAATR

SEQ ID NO: 67118 - protein, 268 aa, Unidentified
QTVPWGITRVQAPAVHNRGITGSGVRVAILDSGISTHEDLNVRGGVSFVPGEPTYADLNGHGTHVAGTVAALNNSIGVVGVAPSADLYAVKVLGANGRGSVSGIAQGLEWAAQNNMHIANMSLGSDEPSSTLERAVNYATSRDVLVIAATGNNGSGSVGYPARYANAMAVGATDQNNRRANFSQYGTGIDIVAPGVNVQSTYPGNRYVSMNGTSMATPHVAGAAALVKQRYPSWNATQIRDHLKNTATNLGNSSQFGSGLVNAEAATR

SEQ ID NO: 67119 - protein, 268 aa, Unidentified
QTVPWGITRVQAPAVHNRGITGSGVRVAILDSGISAHEDLNIRGGASFVPGEPTTADLNGHGTHVAGTVAALDNSIGVIGVAPNAELYAVKVLGANGRGSVSGIAQGLEWAATNNMHIANMSLGAEGPSSTLERAVNYATSRDVLVIAATGNNGSGSVQYPARYANAMAVGATDQNNRRANFSQYGTGIDIVAPGVNVQSTYPGNRYVSMSGTSMATPHVAGAAALVKQRYPSWNATQIRNHLKNTATNLGPSSQFGSGLVNAEAATR

SEQ ID NO: 67120 - protein, 268 aa, Shouchella gibsonii
QTVPWGITRVQAPTVHNRGITGSGVKVAILDTGIAQHSDLTIRGGASFVPGESTTADLNGHGTHVAGTVAALNNSIGVIGVAPSADLYAVKVLGANGRGSVSGIAQGLEWAATNNMHIANMSLGSDAPSTTLERAVNYATSRGVLVIAATGNNGTGSIGYPARYANAMAVGATDQNNRRASFSQYGTGIDIVAPGVGIQSTYLNNSYASNDGTSMATPHVAGVAALVKQKNPSWNATQIRNHLKNTATNLGNSSQFGSGLVNADAATR

SEQ ID NO: 67121 - protein, 268 aa, Unidentified
QTVPWGITRVQAPAVHNRGITGSGVRVAILDSGISTHEDLTIRGGVSFVPGEPTTADLNGHGTHVAGTVAALDNSIGVVGVAPSADLYAVKVLGANGRGSVSGIAQGLEWAAQNNMHIANMSLGSDAPSSTLERAVNYATSRDVLVIAATGNNGSGSVGYPARYANAMAVGATDQNNRRANFSQYGTGIDIVAPGVNVQSTYPGNRYVSMNGTSMATPHVAGAAALVKQRYPSWNATQIRDHLKNTATNLGNSSQFGSGLVNAEAATR

SEQ ID NO: 67122 - protein, 268 aa, Unidentified
QTVPWGITRVQAPTVHNRGTTGSGVKVAILDTGIAQHSDLTIRGGASFVPGESTTADLNGHGTHVAGTVAALNNSIGVIGVAPSADLYAVKVLGANGRGSVSGIAQGLEWAATNNMHIANMSLGSDAPSTTLERAVNYATSRGVLVIAATGNNGTGSIGYPARYANAMAVGATDQNNRRASFSQYGTGIDIVAPGVGIQSTYLNNSYASMPGTSMATPHVAGVAALVKQKNPSWNATQIRNHLKNTATNLGNSSQFGSGLVNADAATR

SEQ ID NO: 67123 - protein, 268 aa, Unidentified
QVVPWGITRVQAPTVHNRGITGSGVKVAILDTGIAQHSDLTIRGGASFVPGESTTADLNGHGTHVAGTVAALNNNIGVIGVAPSADLYAVKVLGANGRGSVSGIAQGLEWAATNNMHIANMSLGSPAPSTTLERAVNYATSRGVLVIAATGNNGTGSIGYPARYANAMAVGATDQNNRRASFSQYGTGIDIVAPGVGIQSTYLNNSYASMPGTSMATPHVAGVAALVKQKNPSWNATQIRNHLKNTATNLGPSSQFGSGLVNADAATR

SEQ ID NO: 67124 - protein, 268 aa, Unidentified
QTVPWGITRVQAPAVHNRGITGSGVRVAILDSGISAHEDLNVRGGASFVPGEPTYADLNGHGTHVAGTVAALNNSIGVIGVAPNADLYAVKVLGANGRGSVSGIAQGLEWAAQNNMHIANMSLGSDFPSSTLERAVNYATSRDVLVIAATGNNGSGSVGYPARYANAMAVGATDQNNRRANFSQYGTGIDIVAPGVNVQSTYPGNRYVSMNGTSMATPHVAGAAALVKQRYPSWNATQIRNHLKNTATNLGNSSQFGSGLVNAEAATR

SEQ ID NO: 67125 - protein, 268 aa, Unidentified
QVVPWGITRVQAPTVHNRGITGSGVKVAILDTGIAQHEDLTIRGGASFVPGESTTADLNGHGTHVAGTVAALDNSIGVIGVAPSADLYAVKVLGANGRGSVSGIAQGLEWAATNNMHIANMSLGSPAPSTTLERAVNYATSRGVLVIAATGNNGTGSIGYPARYANAMAVGATDQNNRRASFSQYGTGIDIVAPGVGIQSTYLNNSYASMPGTSMATPHVAGVAALVKQKNPSWNATQIRNHLKNTATNLGNSSQFGSGLVNADAATR

SEQ ID NO: 67126 - protein, 268 aa, Unidentified
QTVPWGITRVQAPTVHNRGITGSGVKVAILDTGIAQHSDLTIRGGASFVPGESTTADLNGHGTHVAGTVAALNNSIGVIGVAPSADLYAVKVLGANGRGSVSGIAQGLEWAATNNMHIANMSLGSDKPSTTLERAVNYATSRGVLVIAATGNNGTGSIGYPARYANAMAVGATDQNNRRASFSQYGTGIDIVAPGVGIQSTYLNNSYASMPGTSMATPHVAGVAALVKQKNPSWNATQIRNHLKNTATNLGNSSQFGSGLVNADAATR

SEQ ID NO: 67127 - protein, 268 aa, Unidentified
QTVPWGITRVQAPAVHNRGITGSGVRVAILDSGISTHEDLNIRGGVSFVPGEPTTADLNGHGTHVAGTVAALNNSIGVIGVAPNAELYAVKVLGANGRGSISGIAQGLEWAAANNMHVANMSLGTDAPSSTLERAVNYATSADVLVIAATGNNGSGTVSYPARYANAMAVGATDQNNRRANFSQYGTGIDIVAPGVNVQSTYPGNRYVSMSGTSMATPHVAGAAALVKQRYPSWNATQIRNHLKNTATNLGNSSQFGSGLVNAEAATR

SEQ ID NO: 67128 - protein, 268 aa, Unidentified
QTVPWGITRVQAPTVHNRGITGSGVKVAILDTGIAQHSDLTIRGGASFVPGESTTADLNGHGTHVAGTVAALNNSIGVIGVAPSADLYAVKVLGANGRGSVSGIAQGLEWAATNNMHIANMSLGSDAPSTTLERAVNYATSRGVLVIAATGNNGTGSIGYPARYANAMAVGATDQNNRRASFSQYGTGIDIVAPGVGIQSTYLNNSYASMPGTSMATPHVAGVAALVKQKNPSWNATQIRNHLKNTATNLGNSSQFGSGLVNADAATR

SEQ ID NO: 67129 - protein, 268 aa, Unidentified
QTVPWGIERVQAPTVHNRGITGSGVKVAILDTGIAQHSDLTIRGGASFVPGESTTADLNGHGTHVAGTVAALNNSIGVIGVAPSADLYAVKVLGANGRGSVSGIAQGLEWAATNNMHIANMSLGSDAPSTTLERAVNYATSRGVLVIAATGNNGTGSIQYPARYANAMAVGATDQNNRRASFSQYGTGIDIVAPGVGIQSTYLNNSYASMSGTSMATPHVAGVAALVKQKNPSWNATQIRNHLKNTATNLGNSSQFGSGLVNADAATR

SEQ ID NO: 67130 - protein, 268 aa, Unidentified
QVVPWGITRVQAPTVHNRGITGSGVKVAILDTGIAQHSDLTIRGGASFVPGESTTADLNGHGTHVAGTVAALNNSIGVIGVAPSADLYAVKVLGANGRGSVSGIAQGLEWAATNNMHIANMSLGSDAPSTTLERAVNYATSRGVLVIAATGNNGTGSIGYPARYANAMAVGATDQNNQRASFSQYGTGIDIVAPGVGIQSTYLNNSYASMSGTSMATPHVAGVAALVKQKNPSWNATQIRNHLKNTATNLGNSSQFGSGLVNADAATR

SEQ ID NO: 67131 - protein, 268 aa, Unidentified
QTVPWGITRVQAPAVHNRGITGSGVRVAILDSGISTHEDLNVRGGVSFVPGEPTYADLNGHGTHVAGTVAALNNSIGVVGVAPSADLYAVKVLGANGRGSVSGIAQGLEWAAQNNMHIANMSLGSDFPSSTLERAVNYATSRDVLVIAATGNNGSGSVGYPARYANAMAVGATDQNNRRANFSQYGTGIDIVAPGVNVQSTYPGNRYVSMNGTSMATPHVAGAAALVKQRYPSWNATQIRDHLKNTATNLGNSSQFGSGLVNAEAATR

SEQ ID NO: 67132 - protein, 268 aa, Unidentified
QTVPWGITRVQAPAVHNRGITGSGVRVAILDSGISTHEDLNVRGGVSFVPGEPTYADLNGHGTHVAGTVAALNNSIGVVGVAPSADLYAVKVLGANGRGSVSGIAQGLEWAAQNNMHIANMSLGSEGPSSTLERAVNYATSRDVLVIAATGNNGSGSVGYPARYANAMAVGATDQNNRRANFSQYGTGIDIVAPGVNVQSTYPGNRYVSMNGTSMATPHVAGAAALVKQRYPSWNATQIRDHLKNTATNLGNSSQFGSGLVNAEAATR

SEQ ID NO: 67133 - protein, 268 aa, Unidentified
QTVPWGITRVQAPTVHNRGITGSGVKVAILDTGIAQHSDLTIRGGASFVPGESTTADLNGHGTHVAGTVAALNNSIGVIGVAPSAQLYAVKVLGANGRGSVSGIAQGLEWAATNNMHIANMSLGSDAPSTTLERAVNYATSRGVLVIAATGNNGTGSIGYPARYANAMAVGATDQNNRRASFSQYGTGIDIVAPGVGIQSTYLNNSYASMPGTSMATPHVAGVAALVKQKNPSWNATQIRNHLKNTATNLGNSSQFGSGLVNADAATR

SEQ ID NO: 67134 - protein, 268 aa, Unidentified
QTVPWGIERVQAPTVHNRGITGSGVKVAILDTGIAQHEDLTIRGGASFVPGESTTADLNGHGTHVAGTVAALNNSIGVIGVAPSADLYAVKVLGANGRGSVSGIAQGLEWAATNNMHIANMSLGSDAPSTTLERAVNYATSRGVLVIAATGNNGTGSIGYPARYANAMAVGATDQNNRRASFSQYGTGIDIVAPGVGIQSTYLNNSYASMPGTSMATPHVAGVAALVKQKNPSWNATQIRNHLKNTATNLGNSSQFGSGLVNADAATR

SEQ ID NO: 67135 - protein, 268 aa, Bacillus gibsonii
QTVPWGITRVQAPTVHNRGITGSGVKVAILDTGIAQHSDLTIRGGASFVPGESTTADLNGHGTHVAGTVAALDNSIGVIGVAPSADLYAVKVLGADGRGSVSGIAQGLEWAATNNMHIANMSLGSDAPSTTLERAVNYATSRGVLVIAATGNNGTGSIGYPARYANAMAVGATDQNNRRASFSQYGTGIDIVAPGVGIQSTYLNNSYASLDGTSMATPHVAGVAALVKQKNPSWNATQIRNHLKNTATNLGNSSQFGSGLVNADAATR

SEQ ID NO: 67136 - protein, 268 aa, Unidentified
QTVPWGITRVQAPTVHNRGITGSGVKVAILDTGIAQHSDLTIRGGASFVPGESTTADLNGHGTHVAGTVAALNNSIGVIGVAPSAHLYAVKVLGANGRGSVSGIAQGLEWAATNNMHIANMSLGSDAPSTTLERAVNYATSRGVLVIAATGNNGTGSIGYPARYANAMAVGATDQNNRRASFSQYGTGIDIVAPGVGIQSTYLNNSYASMPGTSMATPHVAGVAALVKQKNPSWNATQIRNHLKNTATNLGNSSQFGSGLVNADAATR

SEQ ID NO: 67137 - protein, 268 aa, Unidentified
QTVPWGITRVQAPTVHNRGITGSGVKVAILDTGIAQHEDLTIRGGASFVPGESTTADLNGHGTHVAGTVAALNNSIGVIGVAPSADLYAVKVLGANGRGSVSGIAQGLEWAATNNMHIANMSLGSDAPSTTLERAVNYATSRGVLVIAATGNNGTGSIGYPARYANAMAVGATDQNNQRASFSQYGTGIDIVAPGVGIQSTYLNNSYASMPGTSMATPHVAGVAALVKQKNPSWNATQIRNHLKNTATNLGNSSQFGSGLVNADAATR

SEQ ID NO: 67138 - protein, 268 aa, Unidentified
QTVPWGITRVQAPTVHNRGITGSGVKVAILDTGIAQHEDLTIRGGASFVPGESTTADLNGHGTHVAGTVAALNNSIGVIGVAPSADLYAVKVLGANGRGSVSGIAQGLEWAATNNMHIANMSLGSDAPSTTLERAVNYATSRGVLVIAATGNNGTGSIGYPARYANAMAVGATDQNNQRASFSQYGTGIDIVAPGVGIQSTYLNNSYASMSGTSMATPHVAGVAALVKQKNPSWNATQIRNHLKNTATNLGNSSQFGSGLVNADAATR

SEQ ID NO: 67139 - protein, 268 aa, Unidentified
QTVPWGITRVQAPAVHNRGITGSGVRVAILDSGISTHEDLNVRGGVSFVPGEPTTADLNGHGTHVAGTVAALNNSIGVVGVAPSADLYAVKVLGANGRGSISGIAQGLEWAAANNMHIANMSLGSDAPSSTLERAVNYATSRDVLVIAATGNNGSGSVGYPARYANAMAVGATDQNNRRANFSQYGTGIDIVAPGVNVQSTYPGNRYVSMSGTSMATPHVAGAAALVKQRYPSWNATQIRNHLKNTATNLGNSSQFGSGLVNAEAATR

SEQ ID NO: 67140 - protein, 268 aa, Unidentified
QTVPWGITRVQAPAVHNRGITGSGVRVAILDSGISTHEDLTIRGGVSFVPGEPTTADLNGHGTHVAGTVAALNNSIGVVGVAPSADLYAVKVLGANGRGSVSGIAQGLEWAAANNMHIANMSLGSDAPSSTLERAVNYATSRDVLVIAATGNNGSGTVGYPARYANAMAVGATDQNNRRANFSQYGTGIDIVAPGVNVQSTYPGNRYVSMSGTSMATPHVAGAAALVKQRYPSWNATQIRNHLKNTATNLGNSSQFGSGLVNAEAATR

SEQ ID NO: 67141 - protein, 268 aa, Unidentified
QTVPWGITRVQAPAVHNRGITGSGVRVAILDSGISTHEDLNVRGGVSFVPGEPTYADLNGHGTHVAGTVAALNNSIGVVGVAPSAELYAVKVLGANGRGSVSGIAQGLEWAATNNMHIANMSLGAEGPSSTLERAVNYATSRDVLVIAATGNNGSGSVGYPARYANAMAVGATDQNNRRANFSQYGTGIDIVAPGVNVQSTYPGNRYVSMNGTSMATPHVAGAAALVKQRYPSWNATQIRDHLKNTATNLGNSSQFGSGLVNAEAATR

SEQ ID NO: 67142 - protein, 268 aa, Unidentified
QTVPWGITRVQAPTVHNRGITGSGVKVAILDTGIAQHSDLTIRGGASFVPGESTTADLNGHGTHVAGTVAALNNSIGVIGVAPSADLYAVKVLGADGRGSVSGIAQGLEWAATNNMHIANMSLGSDAPSTTLERAVNYATSRGVLVIAATGNNGTGSIGYPARYANAMAVGATDQNNRRASFSQYGTGIDIVAPGVGIQSTYLNNSYASMPGTSMATPHVAGVAALVKQKNPSWNATQIRNHLKNTATNLGNSSQFGSGLVNADAATR

SEQ ID NO: 67143 - protein, 268 aa, Unidentified
QTVPWGITRVQAPAVHNRGITGSGVRVAILDSGISTHEDLNVRGGVSFVPGEPTYADLNGHGTHVAGTVAALNNSIGVVGVAPSADLYAVKVLGANGRGSVSGIAQGLEWAAQNNMHIANMSLGAEGPSSTLERAVNYATSRDVLVIAATGNNGSGSVGYPARYANAMAVGATDQNNRRANFSQYGTGIDIVAPGVNVQSTYPGNRYVSLNGTSMATPHVAGAAALVKQRYPSWNATQIRDHLKNTATNLGNSSQFGSGLVNAEAATR

SEQ ID NO: 67144 - protein, 268 aa, Unidentified
QTVPWGITRVQAPTVHNRGITGSGVKVAILDTGIAQHSDLTIRGGASFVPGESTTADLNGHGTHVAGTVAALNNSIGVIGVAPSADLYAVKVLGANGRGSVSGIAQGLEWAATNNMHIANMSLGSDVPSTTLERAVNYATSRGVLVIAATGNNGTGSIGYPARYANAMAVGATDQNNRRASFSQYGTGIDIVAPGVGIQSTYLNNSYASMPGTSMATPHVAGVAALVKQKNPSWNATQIRNHLKNTATNLGNSSQFGSGLVNADAATR

SEQ ID NO: 67145 - protein, 268 aa, Unidentified
QTVPWGITRVQAPTVHNRGITGSGVKVAILDTGIAQHSDLTIRGGASFVPGESTTADLNGHGTHVAGTVAALNNSIGVIGVAPSADLYAVKVLGANGRGSVSGIAQGLEWAATNNMHIANMSLGSDMPSTTLERAVNYATSRGVLVIAATGNNGTGSIGYPARYANAMAVGATDQNNRRASFSQYGTGIDIVAPGVGIQSTYLNNSYASMPGTSMATPHVAGVAALVKQKNPSWNATQIRNHLKNTATNLGNSSQFGSGLVNADAATR

SEQ ID NO: 67146 - protein, 268 aa, Unidentified
QTVPWGITRVQAPAVHNRGITGSGVRVAILDSGISTHEDLNVRGGVSFVPGEPTYADLNGHGTHVAGTVAALNNSIGVVGVAPSADLYAVKVLGANGSGSVSGIAQGLEWAAQNNMHIANMSLGLFRPSSTLERAVNYATSRDVLVIAATGNNGSGSVGYPARYANAMAVGATDQNNRRANFSQYGTGIDIVAPGVNVQSTYPGNRYVSMNGTSMATPHVAGAAALVKQRYPSWNATQIRDHLKNTATNLGNSSQFGSGLVNAEAATR

SEQ ID NO: 67147 - protein, 268 aa, Unidentified
QTVPWGIERVQAPTVHNRGITGSGVKVAILDTGIAQHEDLTIRGGASFVPGESTTADLNGHGTHVAGTVAALNNSIGVIGVAPSADLYAVKVLGANGRGSVSGIAQGLEWAATNNMHIANMSLGSDAPSTTLERAVNYATSRGVLVIAATGNNGTGSIGYPARYANAMAVGATDQNNRRASFSQYGTGIDIVAPGVGIQSTYLNNSYASMPGTSMATPHVAGVAALVKQKNPSWNATQIRNHLKNTATNLGPSSQFGSGLVNADAATR

SEQ ID NO: 67148 - protein, 268 aa, Unidentified
QTVPWGITRVQAPTVHNRGITGSGVKVAILDTGIAQHSDLTIRGGASFVPGESTTADLNGHGTHVAGTVAALNNSIGVIGVAPSADLYAVKVLGANGRGSVSGIAQGLEWAATNAMHIANMSLGSDAPSTTLERAVNYATSRGVLVIAATGNNGTGSIGYPARYANAMAVGATDQNNRRASFSQYGTGIDIVAPGVGIQSTYLNNSYASMPGTSMATPHVAGVAALVKQKNPSWNATQIRNHLKNTATNLGNSSQFGSGLVNADAATR

SEQ ID NO: 67149 - protein, 268 aa, Unidentified
QTVPWGITRVQAPAVHNRGITGSGVRVAILDSGISTHEDLNVRGGVSFVPGEPGTADLNGHGTHVAGTVAALNNSIGVVGVAPSADLYAVKVLGANGRGSISGIAQGLEWAAQNNMHIANMSLGSDAPSSTLERAVNYATSADVLVIAATGNNGSGSVGYPARYANAMAVGATDQNNRRANFSQYGTGIDIVAPGVNVQSTYPGNRYVSMNGTSMATPHVAGAAALVKQRYPSWNATQIRNHLKNTATNLGNSSQFGSGLVNAEAATR

SEQ ID NO: 67150 - protein, 268 aa, Unidentified
QTVPWGITRVQAPTVHNRGATGSGVKVAILDTGIAQHSDLTIRGGASFVPGESTTADLNGHGTHVAGTVAALNNSIGVIGVAPSADLYAVKVLGANGRGSVSGIAQGLEWAATNNMHIANMSLGSDAPSTTLERAVNYATSRGVLVIAATGNNGTGSIGYPARYANAMAVGATDQNNRRASFSQYGTGIDIVAPGVGIQSTYLNNSYASMPGTSMATPHVAGVAALVKQKNPSWNATQIRNHLKNTATNLGNSSQFGSGLVNADAATR

SEQ ID NO: 67151 - protein, 268 aa, Unidentified
QTVPWGITRVQAPAVHNRGITGSGVRVAILDSGISAHEDLNIRGGASFVPGEPTTADLNGHGTHVAGTVAALDNSIGVIGVAPNAELYAVKVLGANGRGSVSGIAQGLEWAATNNMHIANMSLGAEGPSSTLERAVNYATSRDVLVIAATGNNGSGSVQYPARYANAMAVGATDQNNQRANFSQYGTGIDIVAPGVNVQSTYPGNRYVSMSGTSMATPHVAGAAALVKQRYPSWNATQIRNHLKNTATNLGPSSQFGSGLVNAEAATR

SEQ ID NO: 67152 - protein, 268 aa, Unidentified
QTVPWGITRVQAPAVHNRGITGSGVRVAILDSGISTHEDLNIRGGVSFVPGEPTYADLNGHGTHVAGTVAALNNSIGVIGVAPNADLYAVKVLGANGRGSVSGIAQGLEWAAANNMHIANMSLGSDAPSSTLERAVNYATSRDVLVIAATGNNGSGSVGYPARYANAMAVGATDQNNRRANFSQYGTGIDIVAPGVNVQSTYPGNRYVSMNGTSMATPHVAGAAALVKQRYPSWNATQIRDHLKNTATNLGNSSQFGSGLVNAEAATR

SEQ ID NO: 67153 - protein, 268 aa, Unidentified
QTVPWGITRVQAPTVHNRGITGSGVKVAILDTGIAQHSDLTIRGGASFVPGESTTADLNGHGTHVAGTVAALNNSIGVIGVAPSADLYAVKVLGANGRGSVSGIAQGLEWAATNNMHIANMSLGSDAPSTTLERAVNYATSRGVLVIAATGNNGTGSIGYPARYANAMAVGATDQNNQRASFSQYGTGIDIVAPGVGIQSTYLNNSYASMPGTSMATPHVAGVAALVKQKNPSWNATQIRNHLKNTATNLGNSSQFGSGLVNADAATR

SEQ ID NO: 67154 - protein, 268 aa, Unidentified
QTVPWGITRVQAPAVHNRGITGSGVRVAILDSGISTHEDLTIRGGASFVPGEPTTADLNGHGTHVAGTVAALNNSIGVIGVAPNAELYAVKVLGANGRGSISGIAQGLEWAAQNNMHIANMSLGTDAPSSTLERAVNYATSRDVLVIAATGNNGSGSVGYPARYANAMAVGATDQNNRRANFSQYGTGIDIVAPGVNVQSTYPGNRYVSMNGTSMATPHVAGAAALVKQRYPSWNATQIRDHLKNTATNLGNSSQFGSGLVNAEAATR

SEQ ID NO: 67155 - protein, 268 aa, Unidentified
QTVPWGITRVQAPAVHNRGITGSGVRVAILDSGISTHEDLNVRGGVSFVPGEPTYADLNGHGTHVAGTVAALNNSIGVVGVAPSADLYAVKVLGANGSGSVSGIAQGLEWAAQNNMHIANMSLGMSTPSSTLERAVNYATSRDVLVIAATGNNGSGSVGYPARYANAMAVGATDQNNRRANFSQYGTGIDIVAPGVNVQSTYPGNRYVSMNGTSMATPHVAGAAALVKQRYPSWNATQIRDHLKNTATNLGNSSQFGSGLVNAEAATR

SEQ ID NO: 67156 - protein, 268 aa, Unidentified
QTVPWGITRVQAPTVHNRGITGSGVKVAILDTGIAQHSDLTIRGGASFVPGESTTADLNGHGTHVAGTVAALNNSIGVIGVAPSADLYAVKVLGANGRGSVSGIAQGLEWAATNNMHIANMSLGSDAPSTTLERAVNYATSRGVLVIAATGNNGTGSIGYPARYANAMAVGATDQNNQRASFSQYGTGIDIVAPGVGIQSTYLNNSYASMPGTSMATPHVAGVAALVKQKNPSWNATQIRNHLKNTATNLGPSSQFGSGLVNADAATR

SEQ ID NO: 67157 - protein, 268 aa, Unidentified
QVVPWGITRVQAPTVHNRGITGSGVKVAILDTGIAQHSDLTIRGGASFVPGESTTADLNGHGTHVAGTVAALNNSIGVIGVAPSADLYAVKVLGANGRGSVSGIAQGLEWAATNNMHIANMSLGSDAPSTTLERAVNYATSRGVLVIAATGNNGTGSIGYPARYANAMAVGATDQNNQRASFSQYGTGIDIVAPGVGIQSTYLNNSYASMSGTSMATPHVAGVAALVKQKNPSWNATQIRNHLKNTATNLGPSSQFGSGLVNADAATR

SEQ ID NO: 67158 - protein, 268 aa, Unidentified
QTVPWGITRVQAPAVHNRGITGSGVRVAILDSGISAHSDLNIRGGASFVPGEPTTADLNGHGTHVAGTVAALNNDIGVIGVAPNAELYAVKVLGANGSGSVSGIAQGLEWAATNNMHIANMSMGSDFPSSTLERAVNYATSRDVLVIAATGNNGSGSVGYPARYANAMAVGATDQNNRRANFSQYGTGIDIVAPGVNVQSTYPGNRYVSMNGTSMLTPHVAGAAALVKQRYPSWNATQIRNHLKNTDTNLGNSSQFGSGLVNAEAATR

SEQ ID NO: 67159 - protein, 268 aa, Unidentified
QTVPWGITRVQAPAVHNRGITGSGVRVAILDSGIAAHEDLNVRGGVSFVPGEPMTADLNGHGTHVAGTVAALNNSIGVVGVAPSADLYAVKVLGANGRGSVSGIAQGLEWAAANNMHIANMSLGSDAPSSTLERAVNYATSRDVLVIAATGNNGSGSVGYPARYANAMAVGATDQNNRRANFSQYGTGIDIVAPGVNVQSTYPGNRYVSMNGTSMATPHVAGAAALVKQRYPSWNATQIRNHLKNTATNLGNSSQFGSGLVNAEAATR

SEQ ID NO: 67160 - protein, 268 aa, Unidentified
QTVPWGITRVQAPAVHNRGITGSGVRVAILDSGISTHEDLNVRGGVSFVPGEPTYADLNGHGTHVAGTVAALNNSIGVVGVAPSADLYAVKVLGANGSGSVSGIAQGLEWAAQNNMHIANMSLGMVGPSSTLERAVNYATSRDVLVIAATGNNGSGSVGYPARYANAMAVGATDQNNRRANFSQYGTGIDIVAPGVNVQSTYPGNRYVSMNGTSMATPHVAGAAALVKQRYPSWNATQIRDHLKNTATNLGNSSQFGSGLVNAEAATR

SEQ ID NO: 67161 - protein, 268 aa, Unidentified
QTVPWGITRVQAPAVHNRGITGSGVRVAILDSGISAHEDLNVRGGVSFVPGEPTTADLNGHGTHVAGTVAALNNSIGVIGVAPNADLYAVKVLGANGSGSVSGIAQGLEWAATNNMHIANMSLGSDFPSSTLERAVNYATSRDVLVIAATGNNGSGSVGYPARYANAMAVGATDQNNRRANFSQYGTGIDIVAPGVNVQSTYPGNRYVSMNGTSMATPHVAGAAALVKQRYPSWNATQIRDHLKNTATNLGNSSQFGSGLVNAEAATR

SEQ ID NO: 67162 - protein, 268 aa, Unidentified
QTVPWGITRVQAPTVHNRGITGSGVKVAILDTGIAQHSDLTIRGGASFVPGESTTADLNGHGTHVAGTVAALNNSIGVIGVAPSASLYAVKVLGANGRGSVSGIAQGLEWAATNNMHIANMSLGSDAPSTTLERAVNYATSRGVLVIAATGNNGTGSIGYPARYANAMAVGATDQNNRRASFSQYGTGIDIVAPGVGIQSTYLNNSYASMPGTSMATPHVAGVAALVKQKNPSWNATQIRNHLKNTATNLGNSSQFGSGLVNADAATR

SEQ ID NO: 67163 - protein, 268 aa, Unidentified
QTVPWGITRVQAPAVHNRGITGSGVRVAILDSGISAHEDLNIRGGASFVPGEPTTADLNGHGTHVAGTVAALDNSIGVIGVAPNAELYAVKVLGANGRGSVSGIAQGLEWAATNNMHIANMSLGAEGPSSTLERAVNYATSRDVLVIAATGNNGSGSVGYPARYANAMAVGATDQNNRRANFSQYGTGIDIVAPGVNVLSTYPGNRYVSMNGTSMATPHVAGAAALVKQRYPSWNATQIRNHLKNTATNLGNSSQFGSGLVNAEAATR

SEQ ID NO: 67164 - protein, 268 aa, Unidentified
QTVPWGITRVQAPTVHNRGITGSGVKVAILDTGIAQHSDLTIRGGASFVPGESTTADLNGHGTHVAGTVAALNNSIGVIGVAPSADLYAVKVLGANGRGSVSGIAQGLEWAATNNMHIANISLGSDAPSTTLERAVNYATSRGVLVIAATGNNGTGSIGYPARYANAMAVGATDQNNRRASFSQYGTGIDIVAPGVGIQSTYLNNSYASMSGTSMATPHVAGVAALVKQKNPSWNATQIRNHLKNTATNLGNSSQFGSGLVNADAATR

SEQ ID NO: 67165 - protein, 268 aa, Unidentified
QTVPWGITRVQAPAVHNRGITGSGVRVAILDSGISTHEDLNVRGGVSFVPGEPTYADLNGHGTHVAGTVAALNNSIGVVGVAPSADLYAVKVLGANGSGSVSGIAQGLEWAAQNNMHIANMSLGAVTPSSTLERAVNYATSRDVLVIAATGNNGSGSVGYPARYANAMAVGATDQNNRRANFSQYGTGIDIVAPGVNVQSTYPGNRYVSMNGTSMATPHVAGAAALVKQRYPSWNATQIRDHLKNTATNLGNSSQFGSGLVNAEAATR

SEQ ID NO: 67166 - protein, 268 aa, Unidentified
QTVPWGITRVQAPTVHNRGITGSGVKVAILDTGIAQHSDLTIRGGASFVPGESTTADLNGHGTHVAGTVAALNNNIGVIGVAPSADLYAVKVLGANGRGSVSGIAQGLEWAATNNMHIANMSLGSPAPSTTLERAVNYATSRGVLVIAATGNNGTGSIGYPARYANAMAVGATDQNNQRASFSQYGTGIDIVAPGVGIQSTYLNNSYASMSGTSMATPHVAGVAALVKQKNPSWNATQIRNHLKNTATNLGNSSQFGSGLVNADAATR

SEQ ID NO: 67167 - protein, 268 aa, Unidentified
QTVPWGITRVQAPTVHNRGITGSGVKVAILDTGIAQHSDLTIRGGASFVPGESTTADLNGHGTHVAGTVAALNNSIGVIGVAPSACLYAVKVLGANGRGSVSGIAQGLEWAATNNMHIANMSLGSDAPSTTLERAVNYATSRGVLVIAATGNNGTGSIGYPARYANAMAVGATDQNNRRASFSQYGTGIDIVAPGVGIQSTYLNNSYASMPGTSMATPHVAGVAALVKQKNPSWNATQIRNHLKNTATNLGNSSQFGSGLVNADAATR

SEQ ID NO: 67168 - protein, 268 aa, Unidentified
QTVPWGITRVQAPTVHNRGHTGSGVKVAILDTGIAQHSDLTIRGGASFVPGESTTADLNGHGTHVAGTVAALNNSIGVIGVAPSADLYAVKVLGANGRGSVSGIAQGLEWAATNNMHIANMSLGSDAPSTTLERAVNYATSRGVLVIAATGNNGTGSIGYPARYANAMAVGATDQNNRRASFSQYGTGIDIVAPGVGIQSTYLNNSYASMPGTSMATPHVAGVAALVKQKNPSWNATQIRNHLKNTATNLGNSSQFGSGLVNADAATR

SEQ ID NO: 67169 - protein, 268 aa, Unidentified
QTVPWGITRVQAPAVHNRGITGSGVRVAILDSGISTHEDLNIRGGVSFVPGEPTYADLNGHGTHVAGTVAALNNSIGVVGVAPSADLYAVKVLGANGRGSVSGIAQGLEWAATNNMHIANMSLGAEGPSSTLERAVNYATSRDVLVIAATGNNGSGSVGYPARYANAMAVGATDQNNRRANFSQYGTGIDIVAPGVNVQSTYPGNRYVSMNGTSMATPHVAGAAALVKQRYPSWNATQIRDHLKNTATNLGNSSQFGSGLVNAEAATR

SEQ ID NO: 67170 - protein, 268 aa, Unidentified
QTVPWGITRVQAPAVHNRGITGSGVRVAILDSGISTHEDLNVRGGVSFVPGEPTYADLNGHGTHVAGTVAALNNSIGVVGVAPSADLYAVKVLGANGSGSVSGIAQGLEWAAQNNMHIANMSLGALNPSSTLERAVNYATSRDVLVIAATGNNGSGSVGYPARYANAMAVGATDQNNRRANFSQYGTGIDIVAPGVNVQSTYPGNRYVSMNGTSMATPHVAGAAALVKQRYPSWNATQIRDHLKNTATNLGNSSQFGSGLVNAEAATR

SEQ ID NO: 67171 - protein, 268 aa, Unidentified
QTVPWGITRVQAPTVHNRGITGSGVKVAILDTGIAQHSDLTIRGGASFVPGESTTADLNGHGTHVAGTVAALNNSIGVIGVAPSAFLYAVKVLGANGRGSVSGIAQGLEWAATNNMHIANMSLGSDAPSTTLERAVNYATSRGVLVIAATGNNGTGSIGYPARYANAMAVGATDQNNRRASFSQYGTGIDIVAPGVGIQSTYLNNSYASMPGTSMATPHVAGVAALVKQKNPSWNATQIRNHLKNTATNLGNSSQFGSGLVNADAATR

SEQ ID NO: 67172 - protein, 268 aa, Unidentified
QTVPWGITRVQAPTVHNRGITGSGVKVAILDTGIAQHSDLTIRGGASFVPGESTTADLNGHGTHVAGTVAALNNSIGVIGVAPSADLYAVKVLGANGRGSVSGIAQGLEWAATNLMHIANMSLGSDAPSTTLERAVNYATSRGVLVIAATGNNGTGSIGYPARYANAMAVGATDQNNRRASFSQYGTGIDIVAPGVGIQSTYLNNSYASMPGTSMATPHVAGVAALVKQKNPSWNATQIRNHLKNTATNLGNSSQFGSGLVNADAATR

SEQ ID NO: 67173 - protein, 268 aa, Unidentified
QTVPWGITRVQAPTVHNRGITGSGVKVAILDTGIAQHSDLTIRGGASFVPGESTTADLNGHGTHVAGTVAALNNSIGVIGVAPSADLYAVKVLGANGRGSVSGIAQGLEWAATNCMHIANMSLGSDAPSTTLERAVNYATSRGVLVIAATGNNGTGSIGYPARYANAMAVGATDQNNRRASFSQYGTGIDIVAPGVGIQSTYLNNSYASMPGTSMATPHVAGVAALVKQKNPSWNATQIRNHLKNTATNLGNSSQFGSGLVNADAATR

SEQ ID NO: 67174 - protein, 268 aa, Unidentified
QTVPWGITRVQAPTVHNRGITGSGVKVAILDTGIAQHSDLTIRGGASFVPGESTTADLNGHGTHVAGTVAALNNSIGVIGVAPSADLYAVKVLGANGRGSVSGIAQGLEWAATNNMHIANMSLGSDAPSTTLERAVNYATSRGVLVIAATGNNGTGSIQYPARYANAMAVGATDQNNRRASFSQYGTGIDIVAPGVGIQSTYLNNSYASMSGTSMATPHVAGVAALVKQKNPSWNATQIRNHLKNTATNLGPSSQFGSGLVNADAATR

SEQ ID NO: 67175 - protein, 268 aa, Unidentified
QVVPWGITRVQAPAVHNRGITGSGVRVAILDSGISAHEDLNIRGGASFVPGEPTTADLNGHGTHVAGTVAALDNNIGVIGVAPNAELYAVKVLGANGRGSVSGIAQGLEWAATNNMHIANMSLGSDFPSSTLERAVNYATSRDVLVIAATGNNGSGSVGYPARYANAMAVGATDQNNRRANFSQYGTGIDIVAPGVNVQSTYPGNRYVSMSGTSMATPHVAGAAALVKQRYPSWNATQIRNHLKNTATNLGPSSQFGSGLVNAEAATR

SEQ ID NO: 67176 - protein, 268 aa, Unidentified
QVVPWGITRVQAPTVHNRGITGSGVKVAILDTGIAQHSDLTIRGGASFVPGESTTADLNGHGTHVAGTVAALNNSIGVIGVAPSADLYAVKVLGANGRGSVSGIAQGLEWAATNNMHIANMSLGSDAPSTTLERAVNYATSRGVLVIAATGNNGTGSIGYPARYANAMAVGATDQNNRRASFSQYGTGIDIVAPGVGIQSTYLNNSYASMPGTSMATPHVAGVAALVKQKNPSWNATQIRNHLKNTATNLGPSSQFGSGLVNADAATR

SEQ ID NO: 67177 - protein, 268 aa, Unidentified
QTVPWGITRVQAPTVHNRGITGSGVKVAILDTGIAQHSDLTIRGGASFVPGESTTADLNGHGTHVAGTVAALNNSIGVIGVAPSAYLYAVKVLGANGRGSVSGIAQGLEWAATNNMHIANMSLGSDAPSTTLERAVNYATSRGVLVIAATGNNGTGSIGYPARYANAMAVGATDQNNRRASFSQYGTGIDIVAPGVGIQSTYLNNSYASMPGTSMATPHVAGVAALVKQKNPSWNATQIRNHLKNTATNLGNSSQFGSGLVNADAATR

SEQ ID NO: 67178 - protein, 268 aa, Unidentified
QTVPWGITRVQAPTVHNRGITGSGVKVAILDTGIAQHSDLTIRGGASFVPGESTTADLNGHGTHVAGTVAALNNSIGVIGVAPSADLYAVKVLGANGRGSVSGIAQGLEWAATNPMHIANMSLGSDAPSTTLERAVNYATSRGVLVIAATGNNGTGSIGYPARYANAMAVGATDQNNRRASFSQYGTGIDIVAPGVGIQSTYLNNSYASMPGTSMATPHVAGVAALVKQKNPSWNATQIRNHLKNTATNLGNSSQFGSGLVNADAATR

SEQ ID NO: 67179 - protein, 268 aa, Unidentified
QTVPWGITRVQAPTVHNRGITGSGVKVAILDTGIAQHSDLTIRGGASFVPGESTTADLNGHGTHVAGTVAALNNSIGVIGVAPSADLYAVKVLGANGRGSVSGIAQGLEWAATNNMHIANISLGSDAPSTTLERAVNYATSRGVLVIAATGNNGTGSIQYPARYANAMAVGATDQNNRRASFSQYGTGIDIVAPGVGIQSTYLNNSYASMPGTSMATPHVAGVAALVKQKNPSWNATQIRNHLKNTATNLGNSSQFGSGLVNADAATR

SEQ ID NO: 67180 - protein, 274 aa, Unidentified
QTVPWGITRVQAPAVHNRGITGSGVRVAILDSGISXTHEDLNVRGGVSFVPGEPTXTADLNGHGTHVAGTVAALNNSIGVVGVAPSADLYAVKVLGANGRGSVSGIAQGLEWAAXNNMHIANMSLGTDAPSSTLERAVNYATSRDVLVIAATGNNGSGSXXXXVGYPARYANAMAVGATDQNNRRANFSQYGTGIDIVAPGVNVQSTYPGNRYVSMNGTSMATPHVAGAAALVKQRYPSWNATQIRXHLKNTATNLGNSSQFGSGLVNAEAATR

SEQ ID NO: 67181 - protein, 268 aa, Unidentified
QTVPWGITRVQAPTVHNRGITGSGVKVAILDTGIAQHEDLTIRGGASFVPGESTTADLNGHGTHVAGTVAALNNSIGVIGVAPSADLYAVKVLGANGRGSVSGIAQGLEWAATNNMHIANMSLGSDAPSTTLERAVNYATSRGVLVIAATGNNGTGSIGYPARYANAMAVGATDQNNRRASFSQYGTGIDIVAPGVGIQSTYLNNSYASMSGTSMATPHVAGVAALVKQKNPSWNATQIRNHLKNTATNLGPSSQFGSGLVNADAATR

SEQ ID NO: 67182 - protein, 268 aa, Unidentified
QTVPWGIERVQAPTVHNRGITGSGVKVAILDTGIAQHSDLTIRGGASFVPGESTTADLNGHGTHVAGTVAALNNSIGVIGVAPSADLYAVKVLGANGRGSVSGIAQGLEWAATNNMHIANMSLGSDAPSTTLERAVNYATSRGVLVIAATGNNGTGSIGYPARYANAMAVGATDQNNQRASFSQYGTGIDIVAPGVGIQSTYLNNSYASMSGTSMATPHVAGVAALVKQKNPSWNATQIRNHLKNTATNLGNSSQFGSGLVNADAATR

SEQ ID NO: 67183 - protein, 268 aa, Unidentified
QTVPWGITRVQAPAVHNRGITGSGVRVAILDSGISAHSELNIRGGASFVPGEPTTADLNGHGTHVAGTVAALNNDIGVIGVAPNAELYAVKVLGANGSGSVSGIAQGLEWAATNNMHIANMSMGSDFPSSTLERAVNYATSRDVLVIAATGNNGSGSVGYPARYQNAMAVGATDQNNRRANFSQYGTGIDIVAPGVNVQSTYPGNRYVSMNGTSMATPHVAGAAALVKQRYPSWNATQIRNHLKNTATNLGNSSQFGSGLVNAEAATR

SEQ ID NO: 67184 - protein, 268 aa, Unidentified
QTVPWGITRVQAPAVHNRGITGSGVRVAILDSGISAHEDLNIRGGASFVPGEPTTADLNGHGTHVAGTVAALDNNIGVIGVAPNAELYAVKVLGANGRGSVSGIAQGLEWAATNNMHIANMSLGSDFPSSTLERAVNYATSRDVLVIAATGNNGSGSVQYPARYANAMAVGATDQNNQRANFSQYGTGIDIVAPGVNVQSTYPGNRYVSMSGTSMATPHVAGAAALVKQRYPSWNATQIRNHLKNTATNLGPSSQFGSGLVNAEAATR

SEQ ID NO: 67185 - protein, 268 aa, Unidentified
QTVPWGITRVQAPTVHNRGYTGSGVKVAILDTGIAQHSDLTIRGGASFVPGESTTADLNGHGTHVAGTVAALNNSIGVIGVAPSADLYAVKVLGANGRGSVSGIAQGLEWAATNNMHIANMSLGSDAPSTTLERAVNYATSRGVLVIAATGNNGTGSIGYPARYANAMAVGATDQNNRRASFSQYGTGIDIVAPGVGIQSTYLNNSYASMPGTSMATPHVAGVAALVKQKNPSWNATQIRNHLKNTATNLGNSSQFGSGLVNADAATR

SEQ ID NO: 67186 - protein, 268 aa, Unidentified
QTVPWGITRVQAPTVHNRGITGSGVKVAILDTGIAQHSDLTIRGGASFVPGESTTADLNGHGTHVAGTVAALNNSIGVIGVAPSADLYAVKVLGANGRGSVSGIAQGLEWAATNEMHIANMSLGSDAPSTTLERAVNYATSRGVLVIAATGNNGTGSIGYPARYANAMAVGATDQNNRRASFSQYGTGIDIVAPGVGIQSTYLNNSYASMPGTSMATPHVAGVAALVKQKNPSWNATQIRNHLKNTATNLGNSSQFGSGLVNADAATR

SEQ ID NO: 67187 - protein, 268 aa, Unidentified
QTVPWGITRVQAPTVHNRGITGSGVKVAILDTGIAQHSDLTIRGGASFVPGESTTADLNGHGTHVAGTVAALNNSIGVIGVAPSADLYAVKVLGANGRGSVSGIAQGLEWAATNNMHIANMSLGSDIPSTTLERAVNYATSRGVLVIAATGNNGTGSIGYPARYANAMAVGATDQNNRRASFSQYGTGIDIVAPGVGIQSTYLNNSYASMPGTSMATPHVAGVAALVKQKNPSWNATQIRNHLKNTATNLGNSSQFGSGLVNADAATR

SEQ ID NO: 67188 - protein, 268 aa, Unidentified
QTVPWGITRVQAPAVHNRGITGSGVRVAILDSGISAHEDLNIRGGASFVPGEPTYADLNGHGTHVAGTVAALNNSIGVIGVAPNADLYAVKVLGANGRGSVSGIAQGLEWAATNNMHIANMSLGTDAPSSTLERAVNYATSRDVLVIAATGNNGSGSVGYPARYANAMAVGATDQNNRRANFSQYGTGIDIVAPGVNVQSTYPGNRYVSMNGTSMATPHVAGAAALVKQRYPSWNATQIRNHLKNTATNLGNSSQFGSGLVNAEAATR

SEQ ID NO: 67189 - protein, 268 aa, Unidentified
QTVPWGITRVQAPAVHNRGITGSGVRVAILDSGISTHEDLNIRGGVSFVPGEPTYADLNGHGTHVAGTVAALNNSIGVVGVAPSADLYAVKVLGANGRGSVSGIAQGLEWAAQNNMHIANMSLGAEGPSSTLERAVNYATSRDVLVIAATGNNGSGSVGYPARYANAMAVGATDQNNRRANFSQYGTGIDIVAPGVNVQSTYPGNRYVSMNGTSMATPHVAGAAALVKQRYPSWNATQIRDHLKNTATNLGNSSQFGSGLVNAEAATR

SEQ ID NO: 67190 - protein, 268 aa, Bacillus gibsonii
QTVPWGITRVQAPAVHNRGITGSGVRVAILDSGISTHEDLNVRGGVSFVPGEPTYADLNGHGTHVAGTVAALNNSIGVVGVAPSADLYAVKVLGANGEGSVSGIAQGLEWAAQNNMHIANMSLGSEFPSSTLERAVNYATSRDVLVIAATGNNGSGSVGYPARYANAMAVGATDQNNRRANFSQYGTGIDIVAPGVNVQSTYPGNRYVSMNGTSMATPHVAGAAALVKQRYPSWNATQIRDHLKNTATNLGNSSQFGSGLVNAEAATR

SEQ ID NO: 67191 - protein, 268 aa, Unidentified
QTVPWGITRVQAPTVHNRGITGSGVKVAILDTGIAQHSDLTIRGGASFVPGESTTADLNGHGTHVAGTVAALNNSIGVIGVAPSADLYAVKVLGANGRGSVSGIAQGLEWAATNMMHIANMSLGSDAPSTTLERAVNYATSRGVLVIAATGNNGTGSIGYPARYANAMAVGATDQNNRRASFSQYGTGIDIVAPGVGIQSTYLNNSYASMPGTSMATPHVAGVAALVKQKNPSWNATQIRNHLKNTATNLGNSSQFGSGLVNADAATR

SEQ ID NO: 67192 - protein, 268 aa, Unidentified
QTVPWGITRVQAPTVHNRGITGSGVKVAILDTGIAQHSDLTIRGGASFVPGESTTADLNGHGTHVAGTVAALNNSIGVIGVAPSADLYAVKVLGANGRGSVSGIAQGLEWAATNQMHIANMSLGSDAPSTTLERAVNYATSRGVLVIAATGNNGTGSIGYPARYANAMAVGATDQNNRRASFSQYGTGIDIVAPGVGIQSTYLNNSYASMPGTSMATPHVAGVAALVKQKNPSWNATQIRNHLKNTATNLGNSSQFGSGLVNADAATR

SEQ ID NO: 67193 - protein, 268 aa, Unidentified
QTVPWGITRVQAPAVHNRGITGSGVRVAILDSGISAHEDLNIRGGASFVPGEPTTADLNGHGTHVAGTVAALNNSIGVIGVAPNADLYAVKVLGANGRGSVSGIAQGLEWAATNNMHIANMSLGTDFPSSTLERAVNYATSRDVLVIAATGNNGSGSVGYPARYANAMAVGATDQNNRRANFSQYGTGIDIVAPGVNVQSTYPGNRYVSMNGTSMATPHVAGAAALVKQRYPSWNATQIRDHLKNTATNLGNSSQFGSGLVNAEAATR

SEQ ID NO: 67194 - protein, 268 aa, Unidentified
QTVPWGITRVQAPTVHNRGITGSGVKVAILDTGIAQHSDLTIRGGASFVPGESTTADLNGHGTHVAGTVAALNNSIGVIGVAPSADLYAVKVLGANGRGSVSGIAQGLEWAATNNMHIANMSLGSDHPSTTLERAVNYATSRGVLVIAATGNNGTGSIGYPARYANAMAVGATDQNNRRASFSQYGTGIDIVAPGVGIQSTYLNNSYASMPGTSMATPHVAGVAALVKQKNPSWNATQIRNHLKNTATNLGNSSQFGSGLVNADAATR

SEQ ID NO: 67195 - protein, 268 aa, Unidentified
QTVPWGITRVQAPAVHNRGITGSGVRVAILDSGISTHEDLNVRGGVSFVPGEPTTADLNGHGTHVAGTVAALNNSIGVVGVAPSADLYAVKVLGANGRGSVSGIAQGLEWAAANNMHIANMSLGTDAPSSTLERAVNYATSRDVLVIAATGNNGSGSVGYPARYANAMAVGATDQNNRRANFSQYGTGIDIVAPGVNVQSTYPGNRYVSMNGTSMATPHVAGAAALVKQRYPSWNATQIRDHLKNTATNLGNSSQFGSGLVNAEAATR

SEQ ID NO: 67196 - protein, 268 aa, Unidentified
QTVPWGITRVQAPAVHNRGITGSGVRVAILDSGISTHEDLNVRGGVSFVPGEPTYADLNGHGTHVAGTVAALNNSIGVVGVAPSADLYAVKVLGANGSGSVSGIAQGLEWAAQNNMHIANMSLGASAPSSTLERAVNYATSRDVLVIAATGNNGSGSVGYPARYANAMAVGATDQNNRRANFSQYGTGIDIVAPGVNVQSTYPGNRYVSMNGTSMATPHVAGAAALVKQRYPSWNATQIRDHLKNTATNLGNSSQFGSGLVNAEAATR

SEQ ID NO: 67197 - protein, 268 aa, Unidentified
QTVPWGITRVQAPAVHNRGITGSGVRVAILDSGISAHEDLNVRGGVSFVPGEPTTADLNGHGTHVAGTVAALNNSIGVIGVAPNADLYAVKVLGANGRGSVSGIAQGLEWAATNNMHIANMSLGSDFPSSTLERAVNYATSRDVLVIAATGNNGSGSVGYPARYANAMAVGATDQNNRRANFSQYGTGIDIVAPGVNVQSTYPGNRYVSMNGTSMATPHVAGAAALVKQRYPSWNATQIRNHLKNTATNLGNSSQFGSGLVNAEAATR

SEQ ID NO: 67198 - protein, 268 aa, Unidentified
QTVPWGITRVQAPAVHNRGITGSGVRVAILDSGISTHEDLNVRGGVSFVPGEPTYADLNGHGTHVAGTVAALNNSIGVVGVAPSADLYAVKVLGANGRGSVSGIAQGLEWAATNNMHIANMSLGAEGPSSTLERAVNYATSRDVLVIAATGNNGSGSVGYPARYANAMAVGATDQNNRRANFSQYGTGIDIVAPGVNVQSTYPGNRYVSMNGTSMATPHVAGAAALVKQRYPSWNATQIRNHLKNTATNLGNSSQFGSGLVNAEAATR

SEQ ID NO: 67199 - protein, 268 aa, Unidentified
QTVPWGITRVQAPTVHNRGITGSGVKVAILDTGIAQHSDLTIRGGASFVPGESTTADLNGHGTHVAGTVAALNNSIGVIGVAPSAVLYAVKVLGANGRGSVSGIAQGLEWAATNNMHIANMSLGSDAPSTTLERAVNYATSRGVLVIAATGNNGTGSIGYPARYANAMAVGATDQNNRRASFSQYGTGIDIVAPGVGIQSTYLNNSYASMPGTSMATPHVAGVAALVKQKNPSWNATQIRNHLKNTATNLGNSSQFGSGLVNADAATR

SEQ ID NO: 67200 - protein, 268 aa, Unidentified
QTVPWGITRVQAPTVHNRGITGSGVKVAILDTGIAQHSDLTIRGGASFVPGESTTADLNGHGTHVAGTVAALNNSIGVIGVAPSADLYAVKVLGANGRGSVSGIAQGLEWAATNNMHIANMSLGSDDPSTTLERAVNYATSRGVLVIAATGNNGTGSIGYPARYANAMAVGATDQNNRRASFSQYGTGIDIVAPGVGIQSTYLNNSYASMPGTSMATPHVAGVAALVKQKNPSWNATQIRNHLKNTATNLGNSSQFGSGLVNADAATR

SEQ ID NO: 67201 - protein, 268 aa, Unidentified
QTVPWGITRVQAPAVHNRGITGSGVRVAILDSGISTHEDLNVRGGVSFVPGEPTYADLNGHGTHVAGTVAALNNSIGVVGVAPSADLYAVKVLGANGHGSVSGIAQGLEWAAQNNMHIANMSLGSSQPSSTLERAVNYATSRDVLVIAATGNNGSGSVGYPARYANAMAVGATDQNNRRANFSQYGTGIDIVAPGVNVQSTYPGNRYVSMNGTSMATPHVAGAAALVKQRYPSWNATQIRDHLKNTATNLGNSSQFGSGLVNAEAATR

SEQ ID NO: 67202 - protein, 268 aa, Unidentified
QTVPWGITRVQAPAVHNRGITGSGVRVAILDSGISAHEDLNIRGGASFVPGEPTTADLNGHGTHVAGTVAALDNSIGVIGVAPNADLYAVKVLGANGRGSVSGIAQGLEWAATNNMHIANMSLGAEGPSSTLERAVNYATSRDVLVIAATGNNGSGSVGYPARYANAMAVGATDQNNRRANFSQYGTGIDIVAPGVNVQSTYPGNRYVSMNGTSMATPHVAGAAALVKQRYPSWNATQIRNHLKNTATNLGNSSQFGSGLVNAEAATR

SEQ ID NO: 67203 - protein, 268 aa, Unidentified
QTVPWGITRVQAPAVHNRGITGSGVRVAILDSGISAHEDLNIRGGASFVPGEPTTADLNGHGTHVAGTVAALDNNIGVIGVAPNAELYAVKVLGANGRGSVSGIAQGLEWAATNNMHIANMSLGSDFPSSTLERAVNYATSRDVLVIAATGNNGSGSVQYPARYANAMAVGATDQNNQRANFSQYGTGIDIVAPGVNVQSTYPGNRYVSMSGTSMATPHVAGAAALVKQRYPSWNATQIRNHLKNTATNLGNSSQFGSGLVNAEAATR

SEQ ID NO: 67204 - protein, 268 aa, Unidentified
QTVPWGIERVQAPTVHNRGITGSGVKVAILDTGIAQHSDLTIRGGASFVPGESTTADLNGHGTHVAGTVAALNNSIGVIGVAPSADLYAVKVLGANGRGSVSGIAQGLEWAATNNMHIANMSLGSDAPSTTLERAVNYATSRGVLVIAATGNNGTGSIGYPARYANAMAVGATDQNNRRASFSQYGTGIDIVAPGVGIQSTYLNNSYASMPGTSMATPHVAGVAALVKQKNPSWNATQIRNHLKNTATNLGPSSQFGSGLVNADAATR

SEQ ID NO: 67205 - protein, 268 aa, Unidentified
QTVPWGITRVQAPTVHNRGITGSGVKVAILDTGIAQHSDLTIRGGASFVPGESTTADLNGHGTHVAGTVAALNNSIGVIGVAPSANLYAVKVLGANGRGSVSGIAQGLEWAATNNMHIANMSLGSDAPSTTLERAVNYATSRGVLVIAATGNNGTGSIGYPARYANAMAVGATDQNNRRASFSQYGTGIDIVAPGVGIQSTYLNNSYASMPGTSMATPHVAGVAALVKQKNPSWNATQIRNHLKNTATNLGNSSQFGSGLVNADAATR

SEQ ID NO: 67206 - protein, 268 aa, Unidentified
QTVPWGITRVQAPAVHNRGITGSGVRVAILDSGISAHSDLNVRGGVSFVPGEPTYADLNGHGTHVAGTVAALNNSIGVIGVAPNAELYAVKVLGANGSGSVSGIAQGLEWAAQNNMHIANMSLGSDFPSSTLERAVNYATSRDVLVIAATGNNGSGSVGYPARYANAMAVGATDQNNRRANFSQYGTGIDIVAPGVNVQSTYPGNRYVSMNGTSMATPHVAGAAALVKQRYPSWNATQIRDHLKNTATNLGNSSQFGSGLVNAEAATR

SEQ ID NO: 67207 - protein, 268 aa, Unidentified
QTVPWGITRVQAPAVHNRGITGSGVRVAILDSGISTHEDLNVRGGVSFVPGEPTYADLNGHGTHVAGTVAALNNSIGVVGVAPSADLYAVKVLGANGSGSVSGIAQGLEWAAQNNMHIANMSLGAWGPSSTLERAVNYATSRDVLVIAATGNNGSGSVGYPARYANAMAVGATDQNNRRANFSQYGTGIDIVAPGVNVQSTYPGNRYVSMNGTSMATPHVAGAAALVKQRYPSWNATQIRDHLKNTATNLGNSSQFGSGLVNAEAATR

SEQ ID NO: 67208 - protein, 268 aa, Unidentified
QTVPWGITRVQAPTVHNRGITGSGVKVAILDTGIAQHSDLTIRGGASFVPGESTTADLNGHGTHVAGTVAALNNSIGVIGVAPSADLYAVKVLGANGRGSVSGIAQGLEWAATNNMHIANMSLGSDLPSTTLERAVNYATSRGVLVIAATGNNGTGSIGYPARYANAMAVGATDQNNRRASFSQYGTGIDIVAPGVGIQSTYLNNSYASMPGTSMATPHVAGVAALVKQKNPSWNATQIRNHLKNTATNLGNSSQFGSGLVNADAATR

SEQ ID NO: 67209 - protein, 268 aa, Unidentified
QTVPWGITRVQAPAVHNRGITGSGVRVAILDSGISTHEDLNVRGGVSFVPGEPTYADLNGHGTHVAGTVAALNNSIGVVGVAPSADLYAVKVLGANGSGSVSGIAQGLEWAATNNMHIANMSLGAEGPSSTLERAVNYATSRDVLVIAATGNNGSGSVGYPARYANAMAVGATDQNNRRANFSQYGTGIDIVAPGVNVQSTYPGNRYVSMNGTSMATPHVAGAAALVKQRYPSWNATQIRDHLKNTATNLGNSSQFGSGLVNAEAATR

SEQ ID NO: 67210 - protein, 268 aa, Unidentified
QTVPWGITRVQAPAVHNRGITGSGVRVAILDSGISAHEDLNIRGGASFVPGEPTTADLNGHGTHVAGTVAALDNSIGVIGVAPNAELYAVKVLGANGRGSVSGIAQGLEWAATNNMHIANMSLGAEGPSSTLERAVNYATSRDVLVIAATGNNGSGSVGYPARYANAMAVGATDQNNRRANFSQYGTGIDIVAPGVNVLSTYPGNRYVSLNGTSMATPHVAGAAALVKQRYPSWNATQIRDHLKNTATNLGNSSEFGSGLVNAEAATR

SEQ ID NO: 67211 - protein, 268 aa, Unidentified
QTVPWGITRVQAPTVHNRGITGSGVKVAILDTGIAQHSDLTIRGGASFVPGESTTADLNGHGTHVAGTVAALNNSIGVIGVAPSADLYAVKVLGANGRGSVSGIAQGLEWAATNDMHIANMSLGSDAPSTTLERAVNYATSRGVLVIAATGNNGTGSIGYPARYANAMAVGATDQNNRRASFSQYGTGIDIVAPGVGIQSTYLNNSYASMPGTSMATPHVAGVAALVKQKNPSWNATQIRNHLKNTATNLGNSSQFGSGLVNADAATR

SEQ ID NO: 67212 - protein, 268 aa, Unidentified
QTVPWGITRVQAPAVHNRGITGSGVRVAILDSGISTHEDLNVRGGVSFVPGEPTYADLNGHGTHVAGTVAALNNSIGVVGVAPSAELYAVKVLGANGRGSVSGIAQGLEWAAQNNMHIANMSLGAEGPSSTLERAVNYATSRDVLVIAATGNNGSGSVGYPARYANAMAVGATDQNNRRANFSQYGTGIDIVAPGVNVQSTYPGNRYVSMNGTSMATPHVAGAAALVKQRYPSWNATQIRDHLKNTATNLGNSSQFGSGLVNAEAATR

SEQ ID NO: 67213 - protein, 268 aa, Unidentified
QTVPWGITRVQAPTVHNRGITGSGVKVAILDTGIAQHSDLTIRGGASFVPGESTTADLNGHGTHVAGTVAALNNSIGVIGVAPSADLYAVKVLGANGRGSVSGIAQGLEWAATNSMHIANMSLGSDAPSTTLERAVNYATSRGVLVIAATGNNGTGSIGYPARYANAMAVGATDQNNRRASFSQYGTGIDIVAPGVGIQSTYLNNSYASMPGTSMATPHVAGVAALVKQKNPSWNATQIRNHLKNTATNLGNSSQFGSGLVNADAATR

SEQ ID NO: 67214 - protein, 268 aa, Unidentified
QTVPWGITRVQAPTVHNRGITGSGVKVAILDTGIAQHSDLTIRGGASFVPGESTTADLNGHGTHVAGTVAALNNSIGVIGVAPSADLYAVKVLGANGRGSVSGIAQGLEWAATNNMHIANISLGSDAPSTTLERAVNYATSRGVLVIAATGNNGTGSIGYPARYANAMAVGATDQNNRRASFSQYGTGIDIVAPGVGIQSTYLNNSYASMPGTSMATPHVAGVAALVKQKNPSWNATQIRNHLKNTATNLGKSSQFGSGLVNADAATR

SEQ ID NO: 67215 - protein, 268 aa, Unidentified
QTVPWGITRVQAPTVHNRGITGSGVKVAILDTGIAQHSDLTIRGGASFVPGESTTADLNGHGTHVAGTVAALNNSIGVIGVAPSADLYAVKVLGANGRGSVSGIAQGLEWAATNNMHIANMSLGSDFPSTTLERAVNYATSRGVLVIAATGNNGTGSIGYPARYANAMAVGATDQNNRRASFSQYGTGIDIVAPGVGIQSTYLNNSYASMPGTSMATPHVAGVAALVKQKNPSWNATQIRNHLKNTATNLGNSSQFGSGLVNADAATR

SEQ ID NO: 67216 - protein, 268 aa, Unidentified
QTVPWGITRVQAPAVHNRGITGSGVRVAILDSGISAHSDLNIRGGASFVPGEPTTADLNGHGTHVAGTVAALDNNIGVIGVAPNAELYAVKVLGANGSGSVSGIAQGLEWAATNNMHIANMSLGSDFPSSTLERAVNYATSRDVLVIAATGNNGSGSVQYPARYANAMAVGATDQNNQRANFSQYGTGIDIVAPGVNVQSTYPGNRYVSMSGTSMATPHVAGAAALVKQRYPSWNATQIRDHLKNTATNLGPSSQFGSGLVNAEAATR

SEQ ID NO: 67217 - protein, 268 aa, Unidentified
QTVPWGITRVQAPTVHNRGITGSGVKVAILDTGIAQHEDLTIRGGASFVPGESTTADLNGHGTHVAGTVAALNNSIGVIGVAPSADLYAVKVLGANGRGSVSGIAQGLEWAATNNMHIANMSLGSDAPSTTLERAVNYATSRGVLVIAATGNNGTGSIGYPARYANAMAVGATDQNNQRASFSQYGTGIDIVAPGVGIQSTYLNNSYASMSGTSMATPHVAGVAALVKQKNPSWNATQIRNHLKNTATNLGPSSQFGSGLVNADAATR

SEQ ID NO: 67218 - protein, 268 aa, Unidentified
QTVPWGITRVQAPTVHNRGITGSGVKVAILDTGIAQHSDLTIRGGASFVPGESTTADLNGHGTHVAGTVAALNNSIGVIGVAPSADLYAVKVLGANGRGSVSGIAQGLEWAATNNMHIANMSLGSDAPSTTLERAVNYATSRGVLVIAATGNNGTGSIGYPARYANAMAVGATDQNNRRASFSQYGTGIDIVAPGVGIQSTYLNNSYASMPGTSMATPHVAGVAALVKQKNPSWNATQIRNHLKNTATNLGPSSQFGSGLVNADAATR

SEQ ID NO: 67219 - protein, 268 aa, Unidentified
QVVPWGIERVQAPTVHNRGITGSGVKVAILDTGIAQHSDLTIRGGASFVPGESTTADLNGHGTHVAGTVAALNNSIGVIGVAPSADLYAVKVLGANGRGSVSGIAQGLEWAATNNMHIANMSLGSDAPSTTLERAVNYATSRGVLVIAATGNNGTGSIGYPARYANAMAVGATDQNNRRASFSQYGTGIDIVAPGVGIQSTYLNNSYASMPGTSMATPHVAGVAALVKQKNPSWNATQIRNHLKNTATNLGNSSQFGSGLVNADAATR

SEQ ID NO: 67220 - protein, 268 aa, Unidentified
QVVPWGITRVQAPTVHNRGITGSGVKVAILDTGIAQHEDLTIRGGASFVPGESTTADLNGHGTHVAGTVAALNNSIGVIGVAPSADLYAVKVLGANGRGSVSGIAQGLEWAATNNMHIANMSLGSDAPSTTLERAVNYATSRGVLVIAATGNNGTGSIGYPARYANAMAVGATDQNNQRASFSQYGTGIDIVAPGVGIQSTYLNNSYASMPGTSMATPHVAGVAALVKQKNPSWNATQIRNHLKNTATNLGNSSQFGSGLVNADAATR

SEQ ID NO: 67221 - protein, 268 aa, Unidentified
QTVPWGIERVQAPTVHNRGITGSGVKVAILDTGIAQHSDLTIRGGASFVPGESTTADLNGHGTHVAGTVAALNNSIGVIGVAPSADLYAVKVLGANGRGSVSGIAQGLEWAATNNMHIANMSLGSDAPSTTLERAVNYATSRGVLVIAATGNNGTGSIGYPARYANAMAVGATDQNNQRASFSQYGTGIDIVAPGVGIQSTYLNNSYASMPGTSMATPHVAGVAALVKQKNPSWNATQIRNHLKNTATNLGPSSQFGSGLVNADAATR

SEQ ID NO: 67222 - protein, 268 aa, Unidentified
QTVPWGITRVQAPAVHNRGITGSGVRVAILDSGISAHEDLNVRGGASFVPGEPTYADLNGHGTHVAGTVAALNNSIGVIGVAPNAELYAVKVLGANGRGSVSGIAQGLEWAAQNNMHIANMSLGSDAPSSTLERAVNYATSRDVLVIAATGNNGSGSVGYPARYANAMAVGATDQNNRRANFSQYGTGIDIVAPGVNVQSTYPGNRYVSMNGTSMATPHVAGAAALVKQRYPSWNATQIRDHLKNTATNLGNSSQFGSGLVNAEAATR

SEQ ID NO: 67223 - protein, 268 aa, Unidentified
QTVPWGITRVQAPAVHNRGITGSGVRVAILDSGISTHEDLNVRGGVSFVPGEPTYADLNGHGTHVAGTVAALNNSIGVVGVAPSADLYAVKVLGANGRGSVSGIAQGLEWAAANNMHIANMSLGSDAPSSTLERAVNYATSRDVLVIAATGNNGSGSVGYPARYANAMAVGATDQNNRRANFSQYGTGIDIVAPGVNVQSTYPGNRYVSMNGTSMATPHVAGAAALVKQRYPSWNATQIRDHLKNTATNLGNSSQFGSGLVNAEAATR

SEQ ID NO: 67224 - protein, 268 aa, Unidentified
QTVPWGITRVQAPAVHNRGITGSGVRVAILDSGISAHSDLNIRGGASFVPGEPTTADLNGHGTHVAGTVAALNNSIGVIGVAPNAELYAVKVLGANGSGSVSGIAQGLEWAATNNMHIANMSMGSDFPSSTLERAVNYATSRDVLVIAATGNNGSGSVGYPARYANAMAVGATDQNNRRANFSQYGTGIDIVAPGVNVQSTYPGNRYVSMNGTSMLSPHVAGAAALVKQRYPSWNATQIRNHLKNTDTNLGNSSQFGSGLVNAEAATR

SEQ ID NO: 67225 - protein, 268 aa, Unidentified
QTVPWGITRVQAPTVHNRGITGSGVKVAILDTGIAQHSDLTIRGGASFVPGESTTADLNGHGTHVAGTVAALNNSIGVIGVAPSADLYAVKVLGANGRGSVSGIAQGLEWAATNWMHIANMSLGSDAPSTTLERAVNYATSRGVLVIAATGNNGTGSIGYPARYANAMAVGATDQNNRRASFSQYGTGIDIVAPGVGIQSTYLNNSYASMPGTSMATPHVAGVAALVKQKNPSWNATQIRNHLKNTATNLGNSSQFGSGLVNADAATR

SEQ ID NO: 67226 - protein, 268 aa, Unidentified
QTVPWGITRVQAPTVHNRGITGSGVKVAILDTGIAQHSDLTIRGGASFVPGESTTADLNGHGTHVAGTVAALNNSIGVIGVAPSADLYAVKVLGANGEGSVSGIAQGLEWAATNNMHIANMSLGSDAPSTTLERAVNYATSRGVLVIAATGNNGTGSIGYPARYANAMAVGATDQNNRRASFSQYGTGIDIVAPGVGIQSTYLNNSYASMPGTSMATPHVAGVAALVKQKNPSWNATQIRNHLKNTATNLGNSSQFGSGLVNADAATR

SEQ ID NO: 67227 - protein, 268 aa, Unidentified
QTVPWGITRVQAPAVHNRGITGSGVRVAILDSGISTHEDLNVRGGASFVPGEPTYADLNGHGTHVAGTVAALNNSIGVVGVAPSADLYAVKVLGANGRGSVSGIAQGLEWAATNNMHIANMSLGAEGPSSTLERAVNYATSRDVLVIAATGNNGSGSVGYPARYANAMAVGATDQNNRRANFSQYGTGIDIVAPGVNVQSTYPGNRYVSMNGTSMATPHVAGAAALVKQRYPSWNATQIRDHLKNTATNLGNSSQFGSGLVNAEAATR

SEQ ID NO: 67228 - protein, 268 aa, Unidentified
QTVPWGITRVQAPAVHNRGITGSGVRVAILDSGISTHEDLNVRGGVSFVPGEPTYADLNGHGTHVAGTVAALNNSIGVVGVAPSADLYAVKVLGANGSGSVSGIAQGLEWAAQNNMHIANMSLGAGNPSSTLERAVNYATSRDVLVIAATGNNGSGSVGYPARYANAMAVGATDQNNRRANFSQYGTGIDIVAPGVNVQSTYPGNRYVSMNGTSMATPHVAGAAALVKQRYPSWNATQIRDHLKNTATNLGNSSQFGSGLVNAEAATR

SEQ ID NO: 67229 - protein, 268 aa, Unidentified
QTVPWGITRVQAPAVHNRGITGSGVRVAILDSGISTHEDLNVRGGVSFVPGEPTTADLNGHGTHVAGTVAALDNSIGVVGVAPSADLYAVKVLGANGRGSVSGIAQGLEWAAANNMHIANMSLGSDAPSSTLERAVNYATSRDVLVIAATGNNGSGSVGYPARYANAMAVGATDQNNRRANFSQYGTGIDIVAPGVNVQSTYPGNRYVSMSGTSMATPHVAGAAALVKQRYPSWNATQIRNHLKNTATNLGNSSQFGSGLVNAEAATR

SEQ ID NO: 67230 - protein, 268 aa, Unidentified
QTVPWGITRVQAPAVHNRGITGSGVRVAILDSGISTHEDLNVRGGVSFVPGETTYADLNGHGTHVAGTVAALNNSIGVVGVAPSADLYAVKVLGANGRGSVSGIAQGLEWAAQNNMHIANLSLGAEGPSSTLERAVNYATSRDVLVIAATGNNGSGSVGYPARYANAMAVGATDQNNRRANFSQYGTGIDIVAPGVNVQSTYPGNRYVSMNGTSMATPHVAGAAALVKQRYPSWNATQIRNHLKNTATNLGNSSQFGSGLVNAEAATR

SEQ ID NO: 67231 - protein, 268 aa, Unidentified
QTVPWGITRVQAPTVHNRGITGSGVKVAILDTGIAQHSDLTIRGGASFVPGESTTADLNGHGTHVAGTVAALNNSIGVIGVAPSAALYAVKVLGANGRGSVSGIAQGLEWAATNNMHIANMSLGSDAPSTTLERAVNYATSRGVLVIAATGNNGTGSIGYPARYANAMAVGATDQNNRRASFSQYGTGIDIVAPGVGIQSTYLNNSYASMPGTSMATPHVAGVAALVKQKNPSWNATQIRNHLKNTATNLGNSSQFGSGLVNADAATR

SEQ ID NO: 67232 - protein, 268 aa, Unidentified
QTVPWGITRVQAPTVHNRGITGSGVKVAILDTGIAQHEDLTIRGGASFVPGESTTADLNGHGTHVAGTVAALNNSIGVIGVAPSADLYAVKVLGANGRGSVSGIAQGLEWAATNNMHIANMSLGSDAPSTTLERAVNYATSRGVLVIAATGNNGTGSIGYPARYANAMAVGATDQNNRRASFSQYGTGIDIVAPGVGIQSTYLNNSYASMPGTSMATPHVAGVAALVKQKNPSWNATQIRNHLKNTATNLGNSSQFGSGLVNADAATR

SEQ ID NO: 67233 - protein, 268 aa, Unidentified
QTVPWGITRVQAPAVHNRGITGSGVRVAILDSGISTHEDLNVRGGVSFVPGEPTYADLNGHGTHVAGTVAALNNSIGVVGVAPSADLYAVKVLGANGKGSVSGIAQGLEWAAQNNMHIANMSLGSLCPSSTLERAVNYATSRDVLVIAATGNNGSGSVGYPARYANAMAVGATDQNNRRANFSQYGTGIDIVAPGVNVQSTYPGNRYVSMNGTSMATPHVAGAAALVKQRYPSWNATQIRDHLKNTATNLGNSSQFGSGLVNAEAATR

SEQ ID NO: 67234 - protein, 268 aa, Unidentified
QTVPWGITRVQAPTVHNRGDTGSGVKVAILDTGIAQHSDLTIRGGASFVPGESTTADLNGHGTHVAGTVAALNNSIGVIGVAPSADLYAVKVLGANGRGSVSGIAQGLEWAATNNMHIANMSLGSDAPSTTLERAVNYATSRGVLVIAATGNNGTGSIGYPARYANAMAVGATDQNNRRASFSQYGTGIDIVAPGVGIQSTYLNNSYASMPGTSMATPHVAGVAALVKQKNPSWNATQIRNHLKNTATNLGNSSQFGSGLVNADAATR

SEQ ID NO: 67235 - protein, 268 aa, Unidentified
QTVPWGITRVQAPTVHNRGITGSGVKVAILDTGIAQHSDLTIRGGASFVPGESTTADLNGHGTHVSGTVAALNNSIGVIGVAPSADLYAVKVLGANGRGSVSGIAQGLEWAATNNMHIANMSLGSPAPSTTLERAVNYATSRGVLVIAATGNNGTGSIGYPARYANAMAVGATDQNNQRASFSQYGTGIDIVAPGVGIQSTYLNNSYASMSGTSMATPHVAGVAALVKQKNPSWNATQIRNHLKNTATNLGNSSQFGSGLVNADAATR

SEQ ID NO: 67236 - protein, 268 aa, Unidentified
QTVPWGITRVQAPTVHNRGITGSGVKVAILDTGIAQHSDLTIRGGASFVPGESTTADLNGHGTHVAGTVAALNNNIGVIGVAPSADLYAVKVLGANGRGSVSGIAQGLEWAATNNMHIANMSLGSPAPSTTLERAVNYATSRGVLVIAATGNNGTGSIGYPARYANAMAVGATDQNNRRASFSQYGTGIDIVAPGVGIQSTYLNNSYASMPGTSMATPHVAGVAALVKQKNPSWNATQIRNHLKNTATNLGNSSQFGSGLVNADAATR

SEQ ID NO: 67237 - protein, 268 aa, Unidentified
QTVPWGITRVQAPAVHNRGITGSGVRVAILDSGISAHEDLNIRGGASFVPGEPTTADLNGHGTHVAGTVAALDNSIGVIGVAPNAELYAVKVLGANGRGSVSGIAQGLEWAATNNMHIANMSLGAEGPSSTLERAVNYATSRDVLVIAATGNNGSGSVGYPARYANAMAVGATDQNNRRANFSQYGTGIDIVAPGVNVQSTYPGNRYVSMNGTSMATPHVAGAAALVKQRYPSWNATQIRDHLKNTATNLGNSSQFGSGLVNAEAATR

SEQ ID NO: 67238 - protein, 268 aa, Unidentified
QTVPWGITRVQAPAVHNRGITGSGVRVAILDSGISTHEDLNVRGGVSFVPGEPTYADLNGHGTHVAGTVAALNNSIGVVGVAPSADLYAVKVLGANGSGSVSGIAQGLEWAAQNNMHIANMSLGRDAPSSTLERAVNYATSRDVLVIAATGNNGSGSVGYPARYANAMAVGATDQNNRRANFSQYGTGIDIVAPGVNVQSTYPGNRYVSMNGTSMATPHVAGAAALVKQRYPSWNATQIRDHLKNTATNLGNSSQFGSGLVNAEAATR

SEQ ID NO: 67239 - protein, 268 aa, Unidentified
QTVPWGITRVQAPTVHNRGITGSGVKVAILDTGIAQHSDLTIRGGASFVPGESTTADLNGHGTHVAGTVAALNNSIGVIGVAPSAKLYAVKVLGANGRGSVSGIAQGLEWAATNNMHIANMSLGSDAPSTTLERAVNYATSRGVLVIAATGNNGTGSIGYPARYANAMAVGATDQNNRRASFSQYGTGIDIVAPGVGIQSTYLNNSYASMPGTSMATPHVAGVAALVKQKNPSWNATQIRNHLKNTATNLGNSSQFGSGLVNADAATR

SEQ ID NO: 67240 - protein, 268 aa, Unidentified
QTVPWGITRVQAPAVHNRGITGSGVRVAILDSGISTHEDLNVRGGVSFVPGEPTYADLNGHGTHVAGTVAALNNSIGVVGVAPSADLYAVKVLGANGRGSVSGIAQGLEWAATNNMHIANMSLGSEGPSSTLERAVNYATSRDVLVIAATGNNGSGSVGYPARYANAMAVGATDQNNRRANFSQYGTGIDIVAPGVNVQSTYPGNRYVSMNGTSMATPHVAGAAALVKQRYPSWNATQIRDHLKNTATNLGNSSQFGSGLVNAEAATR

SEQ ID NO: 67241 - protein, 268 aa, Unidentified
QVVPWGIERVQAPTVHNRGITGSGVKVAILDTGIAQHSDLTIRGGASFVPGESTTADLNGHGTHVAGTVAALNNSIGVIGVAPSADLYAVKVLGANGRGSVSGIAQGLEWAATNNMHIANMSLGSDAPSTTLERAVNYATSRGVLVIAATGNNGTGSIGYPARYANAMAVGATDQNNRRASFSQYGTGIDIVAPGVGIQSTYLNNSYASMPGTSMATPHVAGVAALVKQKNPSWNATQIRNHLKNTATNLGPSSQFGSGLVNADAATR

SEQ ID NO: 67242 - protein, 268 aa, Unidentified
QTVPWGITRVQAPTVHNRGITGSGVKVAILDTGIAQHSDLTIRGGASFVPGESTTADLNGHGTHVAGTVAALNNSIGVIGVAPSADLYAVKVLGANGRGSVSGIAQGLEWAATNNMHIANMSLGSDAPSTTLERAVNYATSRGVLVIAATGNNGTGSIQYPARYANAMAVGATDQNNRRASFSQYGTGIDIVAPGVGIQSTYLNNSYASMSGTSMATPHVAGVAALVKQKNPSWNATQIRNHLKNTATNLGNSSQFGSGLVNADAATR

SEQ ID NO: 67243 - protein, 268 aa, Unidentified
QTVPWGITRVQAPTVHNRGITGSGVKVAILDTGIAQHSDLTIRGGASFVPGESTTADLNGHGTHVAGTVAALNNSIGVIGVAPSADLYAVKVLGANGRGSVSGIAQGLEWAATNNMHIANMSLGSDAPSTTLERAVNYATSRGVLVIAATGNNGTGSIGYPARYANAMAVGATDQNNRRASFSQYGTGIDIVAPGVGIQSTYLNNSYASNPGTSMATPHVAGVAALVKQKNPSWNATQIRNHLKNTATNLGNSSQFGSGLVNADAATR

SEQ ID NO: 67244 - protein, 268 aa, Unidentified
QTVPWGITRVQAPAVHNRGITGSGVRVAILDSGISTHEDLNVRGGVSFVPGEPTYADLNGHGTHVAGTVAALNNSIGVVGVAPSADLYAVKVLGANGRGSVSGIAQGLEWAAQNNMHIANMSLGMPEPSSTLERAVNYATSRDVLVIAATGNNGSGSVGYPARYANAMAVGATDQNNRRANFSQYGTGIDIVAPGVNVQSTYPGNRYVSMNGTSMATPHVAGAAALVKQRYPSWNATQIRDHLKNTATNLGNSSQFGSGLVNAEAATR

SEQ ID NO: 67245 - protein, 268 aa, Unidentified
QTVPWGITRVQAPAVHNRGITGSGVRVAILDSGISTHEDLNVRGGVSFVPGEPTYADLNGHGTHVAGTVAALNNSIGVVGVAPSADLYAVKVLGANGRGSVSGIAQGLEWAAQNNMHIANMSLGSACPSSTLERAVNYATSRDVLVIAATGNNGSGSVGYPARYANAMAVGATDQNNRRANFSQYGTGIDIVAPGVNVQSTYPGNRYVSMNGTSMATPHVAGAAALVKQRYPSWNATQIRDHLKNTATNLGNSSQFGSGLVNAEAATR

SEQ ID NO: 67246 - protein, 268 aa, Unidentified
QTVPWGITRVQAPTVHNRGCTGSGVKVAILDTGIAQHSDLTIRGGASFVPGESTTADLNGHGTHVAGTVAALNNSIGVIGVAPSADLYAVKVLGANGRGSVSGIAQGLEWAATNNMHIANMSLGSDAPSTTLERAVNYATSRGVLVIAATGNNGTGSIGYPARYANAMAVGATDQNNRRASFSQYGTGIDIVAPGVGIQSTYLNNSYASMPGTSMATPHVAGVAALVKQKNPSWNATQIRNHLKNTATNLGNSSQFGSGLVNADAATR

SEQ ID NO: 67247 - protein, 268 aa, Unidentified
QTVPWGITRVQAPTVHNRGITGSGVKVAILDTGIAQHSDLTIRGGASFVPGESTTADLNGHGTHVAGTVAALNNSIGVIGVAPSADLYAVKVLGANGRGSVSGIAQGLEWAATNNMHIANMSLGSDCPSTTLERAVNYATSRGVLVIAATGNNGTGSIGYPARYANAMAVGATDQNNRRASFSQYGTGIDIVAPGVGIQSTYLNNSYASMPGTSMATPHVAGVAALVKQKNPSWNATQIRNHLKNTATNLGNSSQFGSGLVNADAATR

SEQ ID NO: 67248 - protein, 268 aa, Unidentified
QTVPWGITRVQAPAVHNRGITGSGVRVAILDSGISTHEDLNVRGGVSFVPGETTYADLNGHGTHVAGTVAALNNSIGVIGVAPNAELYAVKVLGANGSGSVSGIAQGLEWAATNNMHIANMSLGGDEPSSTLERAVNYATSRDVLVIAATGNNGSGSVGYPARYANAMAVGATDQNNRRANFSQYGTGIDIVAPGVNVQSTYPGNRYVSMNGTSMATPHVAGAAALVKQRYPSWNATQIRNHLKNTATNLGNSSQFGSGLVNAEAATR

SEQ ID NO: 67249 - protein, 268 aa, Unidentified
QTVPWGITRVQAPAVHNRGITGSGVRVAILDSGISTHEDLNVRGGVSFVPGETTYADLNGHGTHVAGTVAALNNSIGVVGVAPSADLYAVKVLGASGRGSVSGIAQGLEWAAQNNMHIANMSLGAEGPSSTLERAVNYATSRDVLVIAATGNNGSGSVGYPARYANAMAVGATDQNNRRANFSQYGTGIDIVAPGVNVQSTYPGNRYVSMNGTSMATPHVAGAAALVKQRYPSWNATQIRNHLKNTATNLGNSSQFGSGLVNAEAATR

SEQ ID NO: 67250 - protein, 268 aa, Unidentified
QTVPWGITRVQAPAVHNRGITGSGVRVAILDSGISTHEDLNVRGGVSFVPGETTYADLNGHGTHVAGTVAALNNSIGVVGVAPSADLYAVKVLGANGRGSVSGIAQGLEWAAQNNMHIANMSLGSSSPSSTLERAVNYATSRDVLVIAATGNNGSGSVGYPARYANAMAVGATDQNNRRANFSQYGTGIDIVAPGVNVQSTYPGNRYVSMNGTSMATPHVAGAAALVKQRYPSWNATQIRDHLKNTATNLGNSSQFGSGLVNAEAATR

SEQ ID NO: 67251 - protein, 268 aa, Unidentified
QTVPWGITRVQAPTVHNRGITGSGVKVAILDTGIAQHSDLTIRGGASFVPGESTTADLNGHGTHVAGTVAALNNSIGVIGVAPSALLYAVKVLGANGRGSVSGIAQGLEWAATNNMHIANMSLGSDAPSTTLERAVNYATSRGVLVIAATGNNGTGSIGYPARYANAMAVGATDQNNRRASFSQYGTGIDIVAPGVGIQSTYLNNSYASMPGTSMATPHVAGVAALVKQKNPSWNATQIRNHLKNTATNLGNSSQFGSGLVNADAATR

SEQ ID NO: 67252 - protein, 268 aa, Unidentified
QTVPWGITRVQAPTVHNRGITGSGVKVAILDTGIAQHSDLTIRGGASFVPGESTTADLNGHGTHVSGTVAALNNSIGVIGVAPSADLYAVKVLGANGRGSVSGIAQGLEWAATNNMHIANMSLGSPAPSTTLERAVNYATSRGVLVIAATGNNGTGSIGYPARYANAMAVGATDQNNRRASFSQYGTGIDIVAPGVGIQSTYLNNSYASMSGTSMATPHVAGVAALVKQKNPSWNATQIRNHLKNTATNLGNSSQFGSGLVNADAATR

SEQ ID NO: 67253 - protein, 268 aa, Unidentified
QTVPWGITRVQAPAVHNRGITGSGVRVAILDSGISTHEDLTIRGGVSFVPGEPTTADLNGHGTHVAGTVAALNNSIGVVGVAPSADLYAVKVLGANGRGSISGIAQGLEWAAQNNMHIANMSLGSDAPSSTLERAVNYATSRDVLVIAATGNNGSGSVGYPARYANAMAVGATDQNNRRANFSQYGTGIDIVAPGVNVQSTYPGNRYVSMNGTSMATPHVAGAAALVKQRYPSWNATQIRDHLKNTATNLGNSSQFGSGLVNAEAATR

SEQ ID NO: 67254 - protein, 268 aa, Unidentified
QTVPWGITRVQAPAVHNRGITGSGVRVAILDSGISTHEDLNVRGGVSFVPGEPTYADLNGHGTHVAGTVAALNNSIGVVGVAPSADLYAVKVLGANGHGSVSGIAQGLEWAAQNNMHIANMSLGSGGPSSTLERAVNYATSRDVLVIAATGNNGSGSVGYPARYANAMAVGATDQNNRRANFSQYGTGIDIVAPGVNVQSTYPGNRYVSMNGTSMATPHVAGAAALVKQRYPSWNATQIRDHLKNTATNLGNSSQFGSGLVNAEAATR

SEQ ID NO: 67255 - protein, 268 aa, Unidentified
QTVPWGITRVQAPTVHNRGITGSGVKVAILDTGIAQHEDLTIRGGASFVPGESTTADLNGHGTHVAGTVAALNNSIGVIGVAPSADLYAVKVLGANGRGSVSGIAQGLEWAATNNMHIANMSLGSDAPSTTLERAVNYATSRGVLVIAATGNNGTGSIGYPARYANAMAVGATDQNNQRASFSQYGTGIDIVAPGVGIQSTYLNNSYASMPGTSMATPHVAGVAALVKQKNPSWNATQIRNHLKNTATNLGPSSQFGSGLVNADAATR

SEQ ID NO: 67256 - protein, 268 aa, Unidentified
QTVPWGITRVQAPAVHNRGITGSGVRVAILDSGISTHEDLNVRGGASFVPGEPTYADLNGHGTHVAGTVAALNNSIGVVGVAPSADLYAVKVLGANGRGSVSGIAQGLEWAAQNNMHIANMSLGAEGPSSTLERAVNYATSRDVLVIAATGNNGSGSVGYPARYANAMAVGATDQNNRRANFSQYGTGIDIVAPGVNVQSTYPGNRYVSMNGTSMATPHVAGAAALVKQRYPSWNATQIRDHLKNTATNLGNSSQFGSGLVNAEAATR

SEQ ID NO: 67257 - protein, 268 aa, Unidentified
QTVPWGITRVQAPTVHNRGITGSGVKVAILDTGIAQHSDLTIRGGASFVPGESTTADLNGHGTHVAGTVAALNNSIGVIGVAPSADLYAVKVLGANGRGSVSGIAQGLEWAATNNMHIANMSLGSDNPSTTLERAVNYATSRGVLVIAATGNNGTGSIGYPARYANAMAVGATDQNNRRASFSQYGTGIDIVAPGVGIQSTYLNNSYASMPGTSMATPHVAGVAALVKQKNPSWNATQIRNHLKNTATNLGNSSQFGSGLVNADAATR

SEQ ID NO: 67258 - protein, 268 aa, Unidentified
QTVPWGITRVQAPTVHNRGPTGSGVKVAILDTGIAQHSDLTIRGGASFVPGESTTADLNGHGTHVAGTVAALNNSIGVIGVAPSADLYAVKVLGANGRGSVSGIAQGLEWAATNNMHIANMSLGSDAPSTTLERAVNYATSRGVLVIAATGNNGTGSIGYPARYANAMAVGATDQNNRRASFSQYGTGIDIVAPGVGIQSTYLNNSYASMPGTSMATPHVAGVAALVKQKNPSWNATQIRNHLKNTATNLGNSSQFGSGLVNADAATR

SEQ ID NO: 67259 - protein, 268 aa, Unidentified
QTVPWGITRVQAPTVHNRGITGSGVKVAILDTGIAQHEDLTIRGGASFVPGESTTADLNGHGTHVAGTVAALNNSIGVIGVAPSADLYAVKVLGANGRGSVSGIAQGLEWAATNNMHIANMSLGSDAPSTTLERAVNYATSRGVLVIAATGNNGTGSIQYPARYANAMAVGATDQNNRRASFSQYGTGIDIVAPGVGIQSTYLNNSYASMSGTSMATPHVAGVAALVKQKNPSWNATQIRNHLKNTATNLGNSSQFGSGLVNADAATR

SEQ ID NO: 67260 - protein, 268 aa, Unidentified
QTVPWGITRVQAPTVHNRGITGSGVKVAILDTGIAQHSDLTIRGGASFVPGESTTADLNGHGTHVAGTVAALNNSIGVIGVAPSADLYAVKVLGANGRGSVSGIAQGLEWAATNNMHIANMSLGSDAPSTTLERAVNYATSRGVLVIAATGNNGTGSIGYPARYANAMAVGATDQNNRRASFSQYGTGIDIVAPGVGIQSTYLNNSYASMDGTSMATPHVAGVAALVKQKNPSWNATQIRNHLKNTATNLGNSSQFGSGLVNADAATR

SEQ ID NO: 67261 - protein, 268 aa, Unidentified
QTVPWGITRVQAPTVHNRGITGSGVKVAILDTGIAQHSDLTIRGGASFVPGESTTADLNGHGTHVAGTVAALNNSIGVIGVAPSADLYAVKVLGANGRGSVSGIAQGLEWAATNFMHIANMSLGSDAPSTTLERAVNYATSRGVLVIAATGNNGTGSIGYPARYANAMAVGATDQNNRRASFSQYGTGIDIVAPGVGIQSTYLNNSYASMPGTSMATPHVAGVAALVKQKNPSWNATQIRNHLKNTATNLGNSSQFGSGLVNADAATR

SEQ ID NO: 67262 - protein, 268 aa, Unidentified
QTVPWGITRVQAPAVHNRGITGSGVRVAILDSGISTHEDLNVRGGVSFVPGEPTTADLNGHGTHVAGTVAALNNSIGVVGVAPSADLYAVKVLGANGRGSVSGIAQGLEWAATNNMHIANMSLGAEGPSSTLERAVNYATSRDVLVIAATGNNGSGSVGYPARYANAMAVGATDQNNRRANFSQYGTGIDIVAPGVNVQSTYPGNRYVSMNGTSMATPHVAGAAALVKQRYPSWNATQIRDHLKNTATNLGNSSQFGSGLVNAEAATR

SEQ ID NO: 67263 - protein, 268 aa, Unidentified
QTVPWGITRVQAPTVHNRGITGSGVKVAILDTGIAQHEDLTIRGGASFVPGESTTADLNGHGTHVAGTVAALNNNIGVIGVAPSADLYAVKVLGANGRGSVSGIAQGLEWAATNNMHIANMSLGSPAPSTTLERAVNYATSRGVLVIAATGNNGTGSIGYPARYANAMAVGATDQNNRRASFSQYGTGIDIVAPGVGIQSTYLNNSYASMPGTSMATPHVAGVAALVKQKNPSWNATQIRNHLKNTATNLGNSSQFGSGLVNADAATR

SEQ ID NO: 67264 - protein, 268 aa, Unidentified
QTVPWGIERVQAPTVHNRGITGSGVKVAILDTGIAQHEDLTIRGGASFVPGESTTADLNGHGTHVAGTVAALNNSIGVIGVAPSADLYAVKVLGANGRGSVSGIAQGLEWAATNNMHIANMSLGSDAPSTTLERAVNYATSRGVLVIAATGNNGTGSIGYPARYANAMAVGATDQNNRRASFSQYGTGIDIVAPGVGIQSTYLNNSYASMSGTSMATPHVAGVAALVKQKNPSWNATQIRNHLKNTATNLGNSSQFGSGLVNADAATR

SEQ ID NO: 67265 - protein, 268 aa, Unidentified
QTVPWGITRVQAPTVHNRGFTGSGVKVAILDTGIAQHSDLTIRGGASFVPGESTTADLNGHGTHVAGTVAALNNSIGVIGVAPSADLYAVKVLGANGRGSVSGIAQGLEWAATNNMHIANMSLGSDAPSTTLERAVNYATSRGVLVIAATGNNGTGSIGYPARYANAMAVGATDQNNRRASFSQYGTGIDIVAPGVGIQSTYLNNSYASMPGTSMATPHVAGVAALVKQKNPSWNATQIRNHLKNTATNLGNSSQFGSGLVNADAATR

SEQ ID NO: 67266 - protein, 268 aa, Unidentified
QTVPWGITRVQAPAVHNRGITGSGVRVAILDSGISTHEDLNVRGGVSFVPGEPTYADLNGHGTHVAGTVAALNNSIGVVGVAPSADLYAVKVLGANGRGSVSGIAQGLEWAAQNNMHIANMSLGEASPSSTLERAVNYATSRDVLVIAATGNNGSGSVGYPARYANAMAVGATDQNNRRANFSQYGTGIDIVAPGVNVQSTYPGNRYVSMNGTSMATPHVAGAAALVKQRYPSWNATQIRDHLKNTATNLGNSSQFGSGLVNAEAATR

SEQ ID NO: 67267 - protein, 268 aa, Unidentified
QTVPWGITRVQAPAVHNRGITGSGVRVAILDSGISTHEDLNVRGGVSFVPGEPTYADLNGHGTHVAGTVAALNNSIGVVGVAPSADLYAVKVLGANGSGSVSGIAQGLEWAAQNNMHIANMSLGGVGPSSTLERAVNYATSRDVLVIAATGNNGSGSVGYPARYANAMAVGATDQNNRRANFSQYGTGIDIVAPGVNVQSTYPGNRYVSMNGTSMATPHVAGAAALVKQRYPSWNATQIRDHLKNTATNLGNSSQFGSGLVNAEAATR

SEQ ID NO: 67268 - protein, 268 aa, Unidentified
QVVPWGITRVQAPTVHNRGITGSGVKVAILDTGIAQHSDLTIRGGASFVPGESTTADLNGHGTHVAGTVAALNNSIGVIGVAPSADLYAVKVLGANGRGSVSGIAQGLEWAATNNMHIANMSLGSDAPSTTLERAVNYATSRGVLVIAATGNNGTGSIGYPARYANAMAVGATDQNNRRASFSQYGTGIDIVAPGVGIQSTYLNNSYASMSGTSMATPHVAGVAALVKQKNPSWNATQIRNHLKNTATNLGNSSQFGSGLVNADAATR

SEQ ID NO: 67269 - protein, 268 aa, Unidentified
QTVPWGITRVQAPTVHNRGITGSGVKVAILDTGIAQHSDLTIRGGASFVPGESTTADLNGHGTHVAGTVAALNNSIGVIGVAPSADLYAVKVLGANGRGSVSGIAQGLEWAATNNMHIANMSLGSDWPSTTLERAVNYATSRGVLVIAATGNNGTGSIGYPARYANAMAVGATDQNNRRASFSQYGTGIDIVAPGVGIQSTYLNNSYASMPGTSMATPHVAGVAALVKQKNPSWNATQIRNHLKNTATNLGNSSQFGSGLVNADAATR

SEQ ID NO: 67270 - protein, 268 aa, Unidentified
QTVPWGITRVQAPTVHNRGRTGSGVKVAILDTGIAQHSDLTIRGGASFVPGESTTADLNGHGTHVAGTVAALNNSIGVIGVAPSADLYAVKVLGANGRGSVSGIAQGLEWAATNNMHIANMSLGSDAPSTTLERAVNYATSRGVLVIAATGNNGTGSIGYPARYANAMAVGATDQNNRRASFSQYGTGIDIVAPGVGIQSTYLNNSYASMPGTSMATPHVAGVAALVKQKNPSWNATQIRNHLKNTATNLGNSSQFGSGLVNADAATR

SEQ ID NO: 67271 - protein, 268 aa, Unidentified
QVVPWGIERVQAPTVHNRGITGSGVKVAILDTGIAQHSDLTIRGGASFVPGESTTADLNGHGTHVAGTVAALNNSIGVIGVAPSADLYAVKVLGANGRGSVSGIAQGLEWAATNNMHIANMSLGSDAPSTTLERAVNYATSRGVLVIAATGNNGTGSIGYPARYANAMAVGATDQNNQRASFSQYGTGIDIVAPGVGIQSTYLNNSYASMPGTSMATPHVAGVAALVKQKNPSWNATQIRNHLKNTATNLGNSSQFGSGLVNADAATR

SEQ ID NO: 67272 - protein, 268 aa, Unidentified
QVVPWGITRVQAPTVHNRGITGSGVKVAILDTGIAQHEDLTIRGGASFVPGESTTADLNGHGTHVAGTVAALNNSIGVIGVAPSADLYAVKVLGANGRGSVSGIAQGLEWAATNNMHIANMSLGSDAPSTTLERAVNYATSRGVLVIAATGNNGTGSIGYPARYANAMAVGATDQNNRRASFSQYGTGIDIVAPGVGIQSTYLNNSYASMPGTSMATPHVAGVAALVKQKNPSWNATQIRNHLKNTATNLGNSSQFGSGLVNADAATR

SEQ ID NO: 67273 - protein, 268 aa, Unidentified
QTVPWGITRVQAPTVHNRGITGSGVKVAILDTGIAQHSDLTIRGGASFVPGESTTADLNGHGTHVAGTVAALNNSIGVIGVAPSADLYAVKVLGANGRGSVSGIAQGLEWAATNNMHIANMSLGSDQPSTTLERAVNYATSRGVLVIAATGNNGTGSIGYPARYANAMAVGATDQNNRRASFSQYGTGIDIVAPGVGIQSTYLNNSYASMPGTSMATPHVAGVAALVKQKNPSWNATQIRNHLKNTATNLGNSSQFGSGLVNADAATR

SEQ ID NO: 67274 - protein, 268 aa, Unidentified
QTVPWGITRVQAPAVHNRGITGSGVRVAILDSGISAHEDLNIRGGASFVPGEPTTADLNGHGTHVAGTVAALDNNIGVIGVAPNAELYAVKVLGANGRGSVSGIAQGLEWAATNNMHIANMSLGSDFPSSTLERAVNYATSRDVLVIAATGNNGSGSVGYPARYANAMAVGATDQNNQRANFSQYGTGIDIVAPGVNVQSTYPGNRYVSMSGTSMATPHVAGAAALVKQRYPSWNATQIRNHLKNTATNLGPSSQFGSGLVNAEAATR

SEQ ID NO: 67275 - protein, 268 aa, Unidentified
QTVPWGITRVQAPTVHNRGITGSGVKVAILDTGIAQHSDLTIRGGASFVPGESTTADLNGHGTHVAGTVAALNNSIGVIGVAPSADLYAVKVLGANGRGSVSGIAQGLEWAATNNMHIANMSLGSDTPSTTLERAVNYATSRGVLVIAATGNNGTGSIGYPARYANAMAVGATDQNNRRASFSQYGTGIDIVAPGVGIQSTYLNNSYASMPGTSMATPHVAGVAALVKQKNPSWNATQIRNHLKNTATNLGNSSQFGSGLVNADAATR

SEQ ID NO: 67276 - protein, 268 aa, Unidentified
QTVPWGITRVQAPAVHNRGITGSGVRVAILDSGISAHEDLNIRGGASFVPGEPTYADLNGHGTHVAGTVAALDNSIGVVGVAPNAELYAVKVLGANGRGSVSGIAQGLEWAATNNMHIANMSLGAEGPSSTLERAVNYATSRDVLVIAATGNNGSGSVGYPARYANAMAVGATDQNNRRANFSQYGTGIDIVAPGVNVQSTYPGNRYVSMNGTSMATPHVAGAAALVKQRYPSWNATQIRNHLKNTATNLGNSSQFGSGLVNAEAATR

SEQ ID NO: 67277 - protein, 268 aa, Unidentified
QTVPWGITRVQAPAVHNRGITGSGVRVAILDSGISAHSDLNVRGGVSFVPGEPTTADLNGHGTHVAGTVAALNNSIGVIGVAPNAELYAVKVLGANGRGSVSGIAQGLEWAATNNMHIANMSLGSDAPSSTLERAVNYATSRDVLVIAATGNNGSGSVGYPARYANAMAVGATDQNNRRANFSQYGTGIDIVAPGVNVQSTYPGNRYVSMNGTSMATPHVAGAAALVKQRYPSWNATQIRDHLKNTATNLGNSSQFGSGLVNAEAATR

SEQ ID NO: 67278 - protein, 268 aa, Unidentified
QTVPWGITRVQAPAVHNRGITGSGVRVAILDSGISAHEDLNIRGGASFVPGEPTYADLNGHGTHVAGTVAALDNSIGVIGVAPNAELYAVKVLGANGRGSVSGIAQGLEWAATNNMHIANMSLGAEGPSSTLERAVNYATSRDVLVIAATGNNGSGSVGYPARYANAMAVGATDQNNRRANFSQYGTGIDIVAPGVNVQSTYPGNRYVSMNGTSMATPHVAGAAALVKQRYPSWNATQIRNHLKNTATNLGNSSQFGSGLVNAEAATR

SEQ ID NO: 67279 - protein, 268 aa, Unidentified
QTVPWGITRVQAPTVHNRGSTGSGVKVAILDTGIAQHSDLTIRGGASFVPGESTTADLNGHGTHVAGTVAALNNSIGVIGVAPSADLYAVKVLGANGRGSVSGIAQGLEWAATNNMHIANMSLGSDAPSTTLERAVNYATSRGVLVIAATGNNGTGSIGYPARYANAMAVGATDQNNRRASFSQYGTGIDIVAPGVGIQSTYLNNSYASMPGTSMATPHVAGVAALVKQKNPSWNATQIRNHLKNTATNLGNSSQFGSGLVNADAATR

SEQ ID NO: 67280 - protein, 268 aa, Unidentified
QTVPWGITRVQAPAVHNRGITGSGVRVAILDSGISTHEDLNVRGGVSFVPGEPTTADLNGHGTHVAGTVAALNNSIGVVGVAPSADLYAVKVLGANGRGSVSGIAQGLEWAAQNNMHIANMSLGAEGPSSTLERAVNYATSRDVLVIAATGNNGSGSVGYPARYANAMAVGATDQNNRRANFSQYGTGIDIVAPGVNVQSTYPGNRYVSMNGTSMATPHVAGAAALVKQRYPSWNATQIRDHLKNTATNLGNSSQFGSGLVNAEAATR

SEQ ID NO: 67281 - protein, 268 aa, Unidentified
QTVPWGITRVQAPTVHNRGKTGSGVKVAILDTGIAQHSDLTIRGGASFVPGESTTADLNGHGTHVAGTVAALNNSIGVIGVAPSADLYAVKVLGANGRGSVSGIAQGLEWAATNNMHIANMSLGSDAPSTTLERAVNYATSRGVLVIAATGNNGTGSIGYPARYANAMAVGATDQNNRRASFSQYGTGIDIVAPGVGIQSTYLNNSYASMPGTSMATPHVAGVAALVKQKNPSWNATQIRNHLKNTATNLGNSSQFGSGLVNADAATR

SEQ ID NO: 67282 - protein, 268 aa, Unidentified
QTVPWGITRVQAPTVHNRGITGSGVKVAILDTGIAQHSDLTIRGGASFVPGESTTADLNGHGTHVAGTVAALNNSIGVIGVAPSARLYAVKVLGANGRGSVSGIAQGLEWAATNNMHIANMSLGSDAPSTTLERAVNYATSRGVLVIAATGNNGTGSIGYPARYANAMAVGATDQNNRRASFSQYGTGIDIVAPGVGIQSTYLNNSYASMPGTSMATPHVAGVAALVKQKNPSWNATQIRNHLKNTATNLGNSSQFGSGLVNADAATR

SEQ ID NO: 67283 - protein, 268 aa, Unidentified
QTVPWGITRVQAPTVHNRGITGSGVKVAILDTGIAQHSDLTIRGGASFVPGESTTADLNGHGTHVAGTVAALNNSIGVIGVAPSATLYAVKVLGANGRGSVSGIAQGLEWAATNNMHIANMSLGSDAPSTTLERAVNYATSRGVLVIAATGNNGTGSIGYPARYANAMAVGATDQNNRRASFSQYGTGIDIVAPGVGIQSTYLNNSYASMPGTSMATPHVAGVAALVKQKNPSWNATQIRNHLKNTATNLGNSSQFGSGLVNADAATR

SEQ ID NO: 67284 - protein, 268 aa, Unidentified
QTVPWGITRVQAPTVHNRGITGSGVKVAILDTGIAQHSDLTIRGGASFVPGESTTADLNGHGTHVAGTVAALNNSIGVIGVAPSADLYAVKVLGANGRGSVSGIAQGLEWAATNNMHIANMSLGSDYPSTTLERAVNYATSRGVLVIAATGNNGTGSIGYPARYANAMAVGATDQNNRRASFSQYGTGIDIVAPGVGIQSTYLNNSYASMPGTSMATPHVAGVAALVKQKNPSWNATQIRNHLKNTATNLGNSSQFGSGLVNADAATR

SEQ ID NO: 67285 - protein, 268 aa, Unidentified
QTVPWGITRVQAPTVHNRGMTGSGVKVAILDTGIAQHSDLTIRGGASFVPGESTTADLNGHGTHVAGTVAALNNSIGVIGVAPSADLYAVKVLGANGRGSVSGIAQGLEWAATNNMHIANMSLGSDAPSTTLERAVNYATSRGVLVIAATGNNGTGSIGYPARYANAMAVGATDQNNRRASFSQYGTGIDIVAPGVGIQSTYLNNSYASMPGTSMATPHVAGVAALVKQKNPSWNATQIRNHLKNTATNLGNSSQFGSGLVNADAATR

SEQ ID NO: 67286 - protein, 268 aa, Unidentified
QTVPWGITRVQAPAVHNRGITGSGVRVAILDSGISTHEDLNVRGGVSFVPGEPTYADLNGHGTHVAGTVAALNNSIGVVGVAPSADLYAVKVLGANGSGSVSGIAQGLEWAAQNNMHIANMSLGGTEPSSTLERAVNYATSRDVLVIAATGNNGSGSVGYPARYANAMAVGATDQNNRRANFSQYGTGIDIVAPGVNVQSTYPGNRYVSMNGTSMATPHVAGAAALVKQRYPSWNATQIRDHLKNTATNLGNSSQFGSGLVNAEAATR

SEQ ID NO: 67287 - protein, 268 aa, Unidentified
QTVPWGITRVQAPTVHNRGITGSGVKVAILDTGIAQHSDLTIRGGASFVPGESTTADLNGHGTHVAGTVAALNNSIGVIGVAPSADLYAVKVLGANGRGSVSGIAQGLEWAATNNMHIANMSLGSDAPSTTLERAVNYATSRGVLVIAATGNNGTGSIGYPARYANAMAVGATDQNNQRASFSQYGTGIDIVAPGVGIQSTYLNNSYASMSGTSMATPHVAGVAALVKQKNPSWNATQIRNHLKNTATNLGPSSQFGSGLVNADAATR

SEQ ID NO: 67288 - protein, 268 aa, Unidentified
QTVPWGITRVQAPAVHNRGITGSGVRVAILDSGISAHEDLNIRGGVSFVPGEPTTADLNGHGTHVAGTVAALDNSIGVIGVAPNAELYAVKVLGANGRGSVSGIAQGLEWAATNNMHIANMSLGAEGPSSTLERAVNYATSRDVLVIAATGNNGSGSVGYPARYANAMAVGATDQNNRRANFSQYGTGIDIVAPGVNVQSTYPGNRYVSMNGTSMATPHVAGAAALVKQRYPSWNATQIRNHLKNTATNLGNSSQFGSGLVNAEAATR

SEQ ID NO: 67289 - protein, 268 aa, Unidentified
QTVPWGITRVQAPTVHNRGITGSGVKVAILDTGIAQHSDLTIRGGASFVPGESTTADLNGHGTHVAGTVAALNNSIGVIGVAPSADLYAVKVLGANGRGSVSGIAQGLEWAATNNMHIANMSLGSDAPSTTLERAVNYATSRGVLVIAATGNNGTGSIQYPARYANAMAVGATDQNNRRASFSQYGTGIDIVAPGVGIQSTYLNNSYASMPGTSMATPHVAGVAALVKQKNPSWNATQIRNHLKNTATNLGNSSQFGSGLVNADAATR

SEQ ID NO: 67290 - protein, 268 aa, Unidentified
QTVPWGIERVQAPTVHNRGITGSGVKVAILDTGIAQHSDLTIRGGASFVPGESTTADLNGHGTHVAGTVAALNNSIGVIGVAPSADLYAVKVLGANGRGSVSGIAQGLEWAATNNMHIANMSLGSDAPSTTLERAVNYATSRGVLVIAATGNNGTGSIGYPARYANAMAVGATDQNNRRASFSQYGTGIDIVAPGVGIQSTYLNNSYASMSGTSMATPHVAGVAALVKQKNPSWNATQIRNHLKNTATNLGPSSQFGSGLVNADAATR

SEQ ID NO: 67291 - protein, 268 aa, Unidentified
QVVPWGITRVQAPTVHNRGITGSGVKVAILDTGIAQHEDLTIRGGASFVPGESTTADLNGHGTHVAGTVAALNNSIGVIGVAPSADLYAVKVLGANGRGSVSGIAQGLEWAATNNMHIANMSLGSDAPSTTLERAVNYATSRGVLVIAATGNNGTGSIQYPARYANAMAVGATDQNNQRASFSQYGTGIDIVAPGVGIQSTYLNNSYASMPGTSMATPHVAGVAALVKQKNPSWNATQIRNHLKNTATNLGNSSQFGSGLVNADAATR

SEQ ID NO: 67292 - protein, 268 aa, Unidentified
QTVPWGITRVQAPAVHNRGITGSGVRVAILDSGISAHEDLNIRGGASFVPGEPTTADLNGHGTHVAGTVAALDNSIGVIGVAPNAELYAVKVLGANGRGSVSGIAQGLEWAATNNMHIANMSLGAEGPSSTLERAVNYATSRDVLVIAATGNNGSGSVQYPARYANAMAVGATDQNNRRANFSQYGTGIDIVAPGVNVQSTYPGNRYVSMSGTSMATPHVAGAAALVKQRYPSWNATQIRNHLKNTATNLGNSSQFGSGLVNAEAATR

SEQ ID NO: 67293 - protein, 268 aa, Unidentified
QTVPWGITRVQAPAVHNRGITGSGVRVAILDSGISTHEDLNVRGGVSFVPGEPTYADLNGHGTHVAGTVAALNNSIGVVGVAPSADLYAVKVLGANGHGSVSGIAQGLEWAAQNNMHIANMSLGSQNPSSTLERAVNYATSRDVLVIAATGNNGSGSVGYPARYANAMAVGATDQNNRRANFSQYGTGIDIVAPGVNVQSTYPGNRYVSMNGTSMATPHVAGAAALVKQRYPSWNATQIRDHLKNTATNLGNSSQFGSGLVNAEAATR

SEQ ID NO: 67294 - protein, 268 aa, Unidentified
QTVPWGITRVQAPAVHNRGITGSGVRVAILDSGISTHEDLNVRGGVSFVPGEPTYADLNGHGTHVAGTVAALNNSIGVVGVAPSADLYAVKVLGANGSGSVSGIAQGLEWAAQNNMHIANMSLGAHVPSSTLERAVNYATSRDVLVIAATGNNGSGSVGYPARYANAMAVGATDQNNRRANFSQYGTGIDIVAPGVNVQSTYPGNRYVSMNGTSMATPHVAGAAALVKQRYPSWNATQIRDHLKNTATNLGNSSQFGSGLVNAEAATR

SEQ ID NO: 67295 - protein, 268 aa, Unidentified
QVVPWGITRVQAPTVHNRGITGSGVKVAILDTGIAQHSDLTIRGGASFVPGESTTADLNGHGTHVAGTVAALNNSIGVIGVAPSADLYAVKVLGANGRGSVSGIAQGLEWAATNNMHIANMSLGSDAPSTTLERAVNYATSRGVLVIAATGNNGTGSIQYPARYANAMAVGATDQNNQRASFSQYGTGIDIVAPGVGIQSTYLNNSYASMSGTSMATPHVAGVAALVKQKNPSWNATQIRNHLKNTATNLGNSSQFGSGLVNADAATR

SEQ ID NO: 67296 - protein, 268 aa, Unidentified
QTVPWGITRVQAPTVHNRGNTGSGVKVAILDTGIAQHSDLTIRGGASFVPGESTTADLNGHGTHVAGTVAALNNSIGVIGVAPSADLYAVKVLGANGRGSVSGIAQGLEWAATNNMHIANMSLGSDAPSTTLERAVNYATSRGVLVIAATGNNGTGSIGYPARYANAMAVGATDQNNRRASFSQYGTGIDIVAPGVGIQSTYLNNSYASMPGTSMATPHVAGVAALVKQKNPSWNATQIRNHLKNTATNLGNSSQFGSGLVNADAATR

SEQ ID NO: 67297 - protein, 268 aa, Unidentified
QVVPWGITRVQAPTVHNRGITGSGVKVAILDTGIAQHSDLTIRGGASFVPGESTTADLNGHGTHVAGTVAALNNSIGVIGVAPSADLYAVKVLGANGRGSVSGIAQGLEWAATNNMHIANMSLGSDAPSTTLERAVNYATSRGVLVIAATGNNGTGSIQYPARYANAMAVGATDQNNRRASFSQYGTGIDIVAPGVGIQSTYLNNSYASMPGTSMATPHVAGVAALVKQKNPSWNATQIRNHLKNTATNLGPSSQFGSGLVNADAATR

SEQ ID NO: 67298 - protein, 268 aa, Unidentified
QTVPWGITRVQAPTVHNRGITGSGVKVAILDTGIAQHSDLTIRGGASFVPGESTTADLNGHGTHVAGTVAALNNSIGVIGVAPSAILYAVKVLGANGRGSVSGIAQGLEWAATNNMHIANMSLGSDAPSTTLERAVNYATSRGVLVIAATGNNGTGSIGYPARYANAMAVGATDQNNRRASFSQYGTGIDIVAPGVGIQSTYLNNSYASMPGTSMATPHVAGVAALVKQKNPSWNATQIRNHLKNTATNLGNSSQFGSGLVNADAATR

SEQ ID NO: 67299 - protein, 268 aa, Unidentified
QTVPWGITRVQAPTVHNRGITGSGVKVAILDTGIAQHSDLTIRGGASFVPGESTTADLNGHGTHVAGTVAALNNSIGVIGVAPSADLYAVKVLGANGRGSVSGIAQGLEWAATNHMHIANMSLGSDAPSTTLERAVNYATSRGVLVIAATGNNGTGSIGYPARYANAMAVGATDQNNRRASFSQYGTGIDIVAPGVGIQSTYLNNSYASMPGTSMATPHVAGVAALVKQKNPSWNATQIRNHLKNTATNLGNSSQFGSGLVNADAATR

SEQ ID NO: 67300 - protein, 268 aa, Unidentified
QVVPWGITRVQAPTVHNRGITGSGVKVAILDTGIAQHSDLTIRGGASFVPGESTTADLNGHGTHVAGTVAALNNSIGVIGVAPSADLYAVKVLGANGRGSVSGIAQGLEWAATNNMHIANMSLGSDAPSTTLERAVNYATSRGVLVIAATGNNGTGSIGYPARYANAMAVGATDQNNQRASFSQYGTGIDIVAPGVGIQSTYLNNSYASMPGTSMATPHVAGVAALVKQKNPSWNATQIRNHLKNTATNLGNSSQFGSGLVNADAATR

SEQ ID NO: 67301 - protein, 268 aa, Unidentified
QTVPWGITRVQAPTVHNRGITGSGVKVAILDTGIAQHSDLTIRGGASFVPGESTTADLNGHGTHVAGTVAALNNSIGVIGVAPSADLYAVKVLGANGRGSVSGIAQGLEWAATNNMHIANMSLGSDEPSTTLERAVNYATSRGVLVIAATGNNGTGSIGYPARYANAMAVGATDQNNRRASFSQYGTGIDIVAPGVGIQSTYLNNSYASMPGTSMATPHVAGVAALVKQKNPSWNATQIRNHLKNTATNLGNSSQFGSGLVNADAATR

SEQ ID NO: 67302 - protein, 268 aa, Unidentified
QTVPWGITRVQAPTVHNRGITGSGVKVAILDTGIAQHEDLTIRGGASFVPGESTTADLNGHGTHVAGTVAALNNSIGVIGVAPSADLYAVKVLGANGRGSVSGIAQGLEWAATNNMHIANMSLGSDAPSTTLERAVNYATSRGVLVIAATGNNGTGSIGYPARYANAMAVGATDQNNRRASFSQYGTGIDIVAPGVGIQSTYLNNSYASMPGTSMATPHVAGVAALVKQKNPSWNATQIRNHLKNTATNLGPSSQFGSGLVNADAATR

SEQ ID NO: 67303 - protein, 268 aa, Unidentified
QTVPWGIERVQAPTVHNRGITGSGVKVAILDTGIAQHEDLTIRGGASFVPGESTTADLNGHGTHVAGTVAALNNSIGVIGVAPSADLYAVKVLGANGRGSVSGIAQGLEWAATNNMHIANMSLGSDAPSTTLERAVNYATSRGVLVIAATGNNGTGSIGYPARYANAMAVGATDQNNQRASFSQYGTGIDIVAPGVGIQSTYLNNSYASMPGTSMATPHVAGVAALVKQKNPSWNATQIRNHLKNTATNLGNSSQFGSGLVNADAATR

SEQ ID NO: 67304 - protein, 268 aa, Unidentified
QTVPWGITRVQAPTVHNRGITGSGVKVAILDTGIAQHSDLTIRGGASFVPGESTTADLNGHGTHVAGTVAALNNSIGVIGVAPSAMLYAVKVLGANGRGSVSGIAQGLEWAATNNMHIANMSLGSDAPSTTLERAVNYATSRGVLVIAATGNNGTGSIGYPARYANAMAVGATDQNNRRASFSQYGTGIDIVAPGVGIQSTYLNNSYASMPGTSMATPHVAGVAALVKQKNPSWNATQIRNHLKNTATNLGNSSQFGSGLVNADAATR

SEQ ID NO: 67305 - protein, 268 aa, Unidentified
QTVPWGITRVQAPAVHNRGITGSGVRVAILDSGISAHEDLNIRGGASFVPGETTTADLNGHGTHVAGTVAALDNSIGVIGVAPNAELYAVKVLGANGRGSVSGIAQGLEWAATNNMHIANMSLGAEGPSSTLERAVNYATSRDVLVIAATGNNGSGSVGYPARYANAMAVGATDQNNRRANFSQYGTGIDIVAPGVNVQSTYPGNRYVSMNGTSMATPHVAGAAALVKQRYPSWNATQIRNHLKNTATNLGNSSQFGSGLVNAEAATR

SEQ ID NO: 67306 - protein, 268 aa, Unidentified
QTVPWGITRVQAPTVHNRGITGSGVKVAILDTGIAQHSDLTIRGGASFVPGESTTADLNGHGTHVAGTVAALNNSIGVIGVAPSADLYAVKVLGANGRGSVSGIAQGLEWAATNIMHIANMSLGSDAPSTTLERAVNYATSRGVLVIAATGNNGTGSIGYPARYANAMAVGATDQNNRRASFSQYGTGIDIVAPGVGIQSTYLNNSYASMPGTSMATPHVAGVAALVKQKNPSWNATQIRNHLKNTATNLGNSSQFGSGLVNADAATR

SEQ ID NO: 67307 - protein, 268 aa, Unidentified
QTVPWGITRVQAPTVHNRGITGSGVKVAILDTGIAQHSDLTIRGGASFVPGESTTADLNGHGTHVAGTVAALNNSIGVIGVAPSADLYAVKVLGANGRGSVSGIAQGLEWAATNNMHIANMSLGSDAPSTTLERAVNYATSRGVLVIAATGNNGTGSIQYPARYANAMAVGATDQNNRRASFSQYGTGIDIVAPGVGIQSTYLNNSYASMPGTSMATPHVAGVAALVKQKNPSWNATQIRNHLKNTATNLGPSSQFGSGLVNADAATR

SEQ ID NO: 67308 - protein, 268 aa, Unidentified
QTVPWGITRVQAPAVHNRGITGSGVRVAILDSGISTHEDLNVRGGVSFVPGEPTTADLNGHGTHVAGTVAALNNSIGVVGVAPSADLYAVKVLGANGRGSVSGIAQGLEWAAQNNMHIANMSLGSDAPSSTLERAVNYATSRDVLVIAATGNNGSGSVGYPARYANAMAVGATDQNNRRANFSQYGTGIDIVAPGVNVQSTYPGNRYVSMSGTSMATPHVAGAAALVKQRYPSWNATQIRDHLKNTATNLGNSSQFGSGLVNAEAATR

SEQ ID NO: 67309 - protein, 268 aa, Unidentified
QTVPWGITRVQAPAVHNRGITGSGVRVAILDSGISTHEDLNVRGGVSFVPGEPTYADLNGHGTHVAGTVAALNNSIGVVGVAPSADLYAVKVLGANGSGSVSGIAQGLEWAAQNNMHIANMSLGMAWPSSTLERAVNYATSRDVLVIAATGNNGSGSVGYPARYANAMAVGATDQNNRRANFSQYGTGIDIVAPGVNVQSTYPGNRYVSMNGTSMATPHVAGAAALVKQRYPSWNATQIRDHLKNTATNLGNSSQFGSGLVNAEAATR

SEQ ID NO: 67310 - protein, 268 aa, Unidentified
QTVPWGITRVQAPAVHNRGITGSGVRVAILDSGISTHEDLNVRGGVSFVPGETTYADLNGHGTHVAGTVAALNNSIGVVGVAPSADLYAVKVLGANGRGSVSGIAQGLEWAAQNNMHIANMSLGSISPSSTLERAVNYATSRDVLVIAATGNNGSGSVGYPARYANAMAVGATDQNNRRANFSQYGTGIDIVAPGVNVQSTYPGNRYVSMNGTSMATPHVAGAAALVKQRYPSWNATQIRDHLKNTATNLGNSSQFGSGLVNAEAATR

SEQ ID NO: 67311 - protein, 268 aa, Unidentified
QVVPWGITRVQAPTVHNRGITGSGVKVAILDTGIAQHEDLTIRGGASFVPGESTTADLNGHGTHVAGTVAALNNSIGVIGVAPSADLYAVKVLGANGRGSVSGIAQGLEWAATNNMHIANMSLGSDAPSTTLERAVNYATSRGVLVIAATGNNGTGSIQYPARYANAMAVGATDQNNRRASFSQYGTGIDIVAPGVGIQSTYLNNSYASMPGTSMATPHVAGVAALVKQKNPSWNATQIRNHLKNTATNLGPSSQFGSGLVNADAATR

SEQ ID NO: 67312 - protein, 268 aa, Unidentified
QTVPWGITRVQAPTVHNRGITGSGVKVAILDTGIAQHEDLTIRGGASFVPGESTTADLNGHGTHVAGTVAALNNSIGVIGVAPSADLYAVKVLGANGRGSVSGIAQGLEWAATNNMHIANMSLGSDAPSTTLERAVNYATSRGVLVIAATGNNGTGSIGYPARYANAMAVGATDQNNRRASFSQYGTGIDIVAPGVGIQSTYLNNSYASMSGTSMATPHVAGVAALVKQKNPSWNATQIRNHLKNTATNLGNSSQFGSGLVNADAATR

SEQ ID NO: 67313 - protein, 268 aa, Unidentified
QVVPWGITRVQAPTVHNRGITGSGVKVAILDTGIAQHEDLTIRGGASFVPGESTTADLNGHGTHVAGTVAALNNSIGVIGVAPSADLYAVKVLGANGRGSVSGIAQGLEWAATNNMHIANMSLGSDAPSTTLERAVNYATSRGVLVIAATGNNGTGSIGYPARYANAMAVGATDQNNRRASFSQYGTGIDIVAPGVGIQSTYLNNSYASMSGTSMATPHVAGVAALVKQKNPSWNATQIRNHLKNTATNLGNSSQFGSGLVNADAATR

SEQ ID NO: 67314 - protein, 268 aa, Unidentified
QTVPWGITRVQAPTVHNRGITGSGVKVAILDTGIAQHSDLTIRGGASFVPGESTTADLNGHGTHVAGTVAALNNSIGVIGVAPSADLYAVKVLGANGRGSVSGIAQGLEWAATNNMHIANMSLGSDAPSTTLERAVNYATSRGVLVIAATGNNGTGSIGYPARYANAMAVGATDQNNRRASFSQYGTGIDIVAPGVGIQSTYLNNSYASMSGTSMATPHVAGVAALVKQKNPSWNATQIRNHLKNTATNLGNSSQFGSGLVNADAATR

SEQ ID NO: 67315 - protein, 268 aa, Unidentified
QTVPWGITRVQAPTVHNRGITGSGVKVAILDTGIAQHSDLTIRGGASFVPGESTTADLNGHGTHVAGTVAALNNSIGVIGVAPSADLYAVKVLGANGRGSVSGIAQGLEWAATNNMHIANMSLGSDAPSTTLERAVNYATSRGVLVIAATGNNGTGSIQYPARYANAMAVGATDQNNQRASFSQYGTGIDIVAPGVGIQSTYLNNSYASMPGTSMATPHVAGVAALVKQKNPSWNATQIRNHLKNTATNLGNSSQFGSGLVNADAATR

SEQ ID NO: 67316 - protein, 268 aa, Unidentified
QTVPWGITRVQAPTVHNRGITGSGVKVAILDTGIAQHSDLTIRGGASFVPGESTTADLNGHGTHVAGTVAALNNSIGVIGVAPSADLYAVKVLGANGRGSVSGIAQGLEWAATNNMHIANMSLGSDAPSTTLERAVNYATSRGVLVIAATGNNGTGSIGYPARYANAMAVGATDQNNRRASFSQYGTGIDIVAPGVGIQSTYLNNSYASMSGTSMATPHVAGVAALVKQKNPSWNATQIRNHLKNTATNLGPSSQFGSGLVNADAATR

SEQ ID NO: 67317 - protein, 268 aa, Unidentified
QTVPWGITRVQAPAVHNRGITGSGVRVAILDSGISAHSDLNIRGGASFVPGEPTTADLNGHGTHVAGTVAALNNSIGVVGVAPSADLYAVKVLGANGRGSISGIAQGLEWAAQNNMHVANMSLGTDAPSSTLERAVNYATSADVLVIAATGNNGSGSVGYPARYANAMAVGATDQNNRRANFSQYGTGIDIVAPGVNVQSTYPGNRYVSMNGTSMATPHVAGAAALVKQRYPSWNATQIRDHLKNTATNLGNSSQFGSGLVNAEAATR

SEQ ID NO: 67318 - protein, 268 aa, Unidentified
QTVPWGITRVQAPAVHNRGITGSGVRVAILDSGIAAHEDLNVRGGVSFVPGEPTTADLNGHGTHVAGTVAALNNSIGVVGVAPSADLYAVKVLGANGRGSVSGIAQGLEWAAANNMHIANMSLGSDAPSSTLERAVNYATSRDVLVIAATGNNGSGSVGYPARYANAMAVGATDQNNRRANFSQYGTGIDIVAPGVNVQSTYPGNRYVSMSGTSMATPHVAGAAALVKQRYPSWNATQIRNHLKNTATNLGNSNQFGSGLVNAEAATR

SEQ ID NO: 67319 - protein, 268 aa, Unidentified
QTVPWGITRVQAPTVHNRGWTGSGVKVAILDTGIAQHSDLTIRGGASFVPGESTTADLNGHGTHVAGTVAALNNSIGVIGVAPSADLYAVKVLGANGRGSVSGIAQGLEWAATNNMHIANMSLGSDAPSTTLERAVNYATSRGVLVIAATGNNGTGSIGYPARYANAMAVGATDQNNRRASFSQYGTGIDIVAPGVGIQSTYLNNSYASMPGTSMATPHVAGVAALVKQKNPSWNATQIRNHLKNTATNLGNSSQFGSGLVNADAATR

SEQ ID NO: 67320 - protein, 268 aa, Unidentified
QTVPWGITRVQAPTVHNRGITGSGVKVAILDTGIAQHSDLTIRGGASFVPGESTTADLNGHGTHVAGTVAALNNSIGVIGVAPSAPLYAVKVLGANGRGSVSGIAQGLEWAATNNMHIANMSLGSDAPSTTLERAVNYATSRGVLVIAATGNNGTGSIGYPARYANAMAVGATDQNNRRASFSQYGTGIDIVAPGVGIQSTYLNNSYASMPGTSMATPHVAGVAALVKQKNPSWNATQIRNHLKNTATNLGNSSQFGSGLVNADAATR

SEQ ID NO: 67321 - protein, 268 aa, Unidentified
QTVPWGITRVQAPTVHNRGITGSGVKVAILDTGIAQHSDLTIRGGASFVPGESTTADLNGHGTHVAGTVAALNNSIGVIGVAPSADLYAVKVLGANGRGSVSGIAQGLEWAATNVMHIANMSLGSDAPSTTLERAVNYATSRGVLVIAATGNNGTGSIGYPARYANAMAVGATDQNNRRASFSQYGTGIDIVAPGVGIQSTYLNNSYASMPGTSMATPHVAGVAALVKQKNPSWNATQIRNHLKNTATNLGNSSQFGSGLVNADAATR

SEQ ID NO: 67322 - protein, 268 aa, Unidentified
QTVPWGITRVQAPAVHNRGITGSGVRVAILDSGISTHEDLNVRGGVSFVPGEPTYADLNGHGTHVAGTVAALNNSIGVVGVAPSADLYAVKVLGANGRGSVSGIAQGLEWAAQNNIHIANLSLGAEGPSSTLERAVNYATSRDVLVIAATGNNGSGSVGYPARYANAMAVGATDQNNRRANFSQYGTGIDIVAPGVNVQSTYPGNRYVSLNGTSMATPHVAGAAALVKQRYPSWNATQIRDHLKNTATNLGNSSQFGSGLVNAEAATR

SEQ ID NO: 67323 - protein, 268 aa, Unidentified
QTVPWGITRVQAPTVHNRGITGSGVKVAILDTGIAQHSDLTIRGGASFVPGESTTADLNGHGTHVAGTVAALNNSIGVIGVAPSADLYAVKVLGANGRGSVSGIAQGLEWAATNYMHIANMSLGSDAPSTTLERAVNYATSRGVLVIAATGNNGTGSIGYPARYANAMAVGATDQNNRRASFSQYGTGIDIVAPGVGIQSTYLNNSYASMPGTSMATPHVAGVAALVKQKNPSWNATQIRNHLKNTATNLGNSSQFGSGLVNADAATR

SEQ ID NO: 67324 - protein, 268 aa, Unidentified
QVVPWGITRVQAPTVHNRGITGSGVKVAILDTGIAQHSDLTIRGGASFVPGESTTADLNGHGTHVAGTVAALNNSIGVIGVAPSADLYAVKVLGANGRGSVSGIAQGLEWAATNNMHIANMSLGSDAPSTTLERAVNYATSRGVLVIAATGNNGTGSIGYPARYANAMAVGATDQNNRRASFSQYGTGIDIVAPGVGIQSTYLNNSYASMPGTSMATPHVAGVAALVKQKNPSWNATQIRNHLKNTATNLGNSSQFGSGLVNADAATR

SEQ ID NO: 67325 - protein, 268 aa, Unidentified
QVVPWGIERVQAPTVHNRGITGSGVKVAILDTGIAQHSDLTIRGGASFVPGESTTADLNGHGTHVAGTVAALNNSIGVIGVAPSADLYAVKVLGANGRGSVSGIAQGLEWAATNNMHIANMSLGSDAPSTTLERAVNYATSRGVLVIAATGNNGTGSIGYPARYANAMAVGATDQNNRRASFSQYGTGIDIVAPGVGIQSTYLNNSYASMSGTSMATPHVAGVAALVKQKNPSWNATQIRNHLKNTATNLGNSSQFGSGLVNADAATR

SEQ ID NO: 67326 - protein, 268 aa, Unidentified
QTVPWGITRVQAPAVHNRGITGSGVRVAILDSGISAHEDLNIRGGVSFVPGEPTYADLNGHGTHVAGTVAALNNSIGVIGVAPSADLYAVKVLGANGRGSVSGIAQGLEWAAQNNMHIANMSLGTDAPSSTLERAVNYATSRDVLVIAATGNNGSGSVGYPARYANAMAVGATDQNNRRANFSQYGTGIDIVAPGVNVQSTYPGNRYVSMNGTSMATPHVAGAAALVKQRYPSWNATQIRNHLKNTATNLGNSSQFGSGLVNAEAATR

SEQ ID NO: 67327 - protein, 268 aa, Unidentified
QTVPWGITRVQAPTVHNRGITGSGVKVAILDTGIAQHSDLTIRGGASFVPGESTTADLNGHGTHVAGTVAALDNSIGVIGVAPSADLYAVKVLGANGRGSVSGIAQGLEWAATNNMHIANMSLGSPAPSTTLERAVNYATSRGVLVIAATGNNGTGSIGYPARYANAMAVGATDQNNRRASFSQYGTGIDIVAPGVGIQSTYLNNSYASMPGTSMATPHVAGVAALVKQKNPSWNATQIRNHLKNTATNLGNSSQFGSGLVNADAATR

SEQ ID NO: 67328 - protein, 268 aa, Unidentified
QTVPWGITRVQAPAVHNRGITGSGVRVAILDSGISTHEDLNVRGGVSFVPGEPTTADLNGHGTHVAGTVAALNNSIGVVGVAPSADLYAVKVLGANGRGSVSGIAQGLEWAAQNNMHIANMSLGTDAPSSTLERAVNYATSADVLVIAATGNNGSGSVGYPARYANAMAVGATDQNNRRANFSQYGTGIDIVAPGVNVQSTYPGNRYVSMNGTSMATPHVAGAAALVKQRYPSWNATQIRNHLKNTATNLGNSSQFGSGLVNAEAATR

SEQ ID NO: 67329 - protein, 268 aa, Unidentified
QTVPWGITRVQAPAVHNRGITGSGVRVAILDSGISTHEDLNVRGGVSFVPGEPTYADLNGHGTHVAGTVAALNNSIGVVGVAPSADLYAVKVLGANGSGSVSGIAQGLEWAAQNNMHIANMSLGQLHPSSTLERAVNYATSRDVLVIAATGNNGSGSVGYPARYANAMAVGATDQNNRRANFSQYGTGIDIVAPGVNVQSTYPGNRYVSMNGTSMATPHVAGAAALVKQRYPSWNATQIRDHLKNTATNLGNSSQFGSGLVNAEAATR

SEQ ID NO: 67330 - protein, 268 aa, Unidentified
QTVPWGITRVQAPTVHNRGITGSGVKVAILDTGIAQHSDLTIRGGASFVPGESTTADLNGHGTHVAGTVAALNNSIGVIGVAPSADLYAVKVLGANGRGSVSGIAQGLEWAATNKMHIANMSLGSDAPSTTLERAVNYATSRGVLVIAATGNNGTGSIGYPARYANAMAVGATDQNNRRASFSQYGTGIDIVAPGVGIQSTYLNNSYASMPGTSMATPHVAGVAALVKQKNPSWNATQIRNHLKNTATNLGNSSQFGSGLVNADAATR

SEQ ID NO: 67331 - protein, 268 aa, Unidentified
QTVPWGITRVQAPAVHNRGITGSGVRVAILDSGISTHEDLNIRGGVSFVPGEPTYADLNGHGTHVAGTVAALNNSIGVVGVAPSADLYAVKVLGANGRGSVSGIAQGLEWAAQNNMHIANMSLGSDFPSSTLERAVNYATSADVLVIAATGNNGSGSVGYPARYANAMAVGATDQNNRRANFSQYGTGIDIVAPGVNVQSTYPGNRYVSMNGTSMATPHVAGAAALVKQRYPSWNATQIRDHLKNTATNLGNSSQFGSGLVNAEAATR

SEQ ID NO: 67332 - protein, 268 aa, Unidentified
QTVPWGITRVQAPAVHNRGITGSGVRVAILDSGISTHEDLNVRGGVSFVPGEPTYADLNGHGTHVAGTVAALNNSIGVVGVAPSADLYAVKVLGANGSGSVSGIAQGLEWAAQNNMHIANMSLGMSAPSSTLERAVNYATSRDVLVIAATGNNGSGSVGYPARYANAMAVGATDQNNRRANFSQYGTGIDIVAPGVNVQSTYPGNRYVSMNGTSMATPHVAGAAALVKQRYPSWNATQIRDHLKNTATNLGNSSQFGSGLVNAEAATR

SEQ ID NO: 67333 - protein, 268 aa, Unidentified
QTVPWGITRVQAPTVHNRGITGSGVKVAILDTGIAQHSDLTIRGGASFVPGESTTADLNGHGTHVAGTVAALNNSIGVIGVAPSADLYAVKVLGADGEGSVSGIAQGLEWAATNNMHIANMSLGSDAPSTTLERAVNYATSRGVLVIAATGNNGTGSIGYPARYANAMAVGATDQNNRRASFSQYGTGIDIVAPGVGIQSTYLNNSYASMPGTSMATPHVAGVAALVKQKNPSWNATQIRNHLKNTATNLGNSSQFGSGLVNADAATR

SEQ ID NO: 67334 - protein, 268 aa, Shouchella gibsonii
QTVPWGITRVQAPAVHNRGITGSGVRVAILDSGISAHEDLNIRGGASFVPGEPTTADLNGHGTHVAGTVAALDNSIGVIGVAPNAELYAVKVLGANGRGSVSGIAQGLEWAATNNMHIANMSLGAEGPSSTLERAVNYATSRDVLVIAATGNNGSGSVGYPARYANAMAVGATDQNNRRANFSQYGTGIDIVAPGVGVQSTYPGNRYVSQNGTSMATPHVAGAAALVKQRYPSWNATQIRNHLKNTATNLGNSSQFGSGLVNAEAATR

SEQ ID NO: 67335 - protein, 268 aa, Unidentified
QTVPWGITRVQAPAVHNRGITGSGVRVAILDSGISAHEDLNVRGGASFVPGEPTTADLNGHGTHVAGTVAALDNSIGVIGVAPNAELYAVKVLGANGRGSVSGIAQGLEWAATNNMHIANMSLGAEGPSSTLERAVNYATSRDVLVIAATGNNGSGSVGYPARYANAMAVGATDQNNRRANFSQYGTGIDIVAPGVNVQSTYPGNRYVSMNGTSMATPHVAGAAALVKQRYPSWNATQIRNHLKNTATNLGNSSQFGSGLVNAEAATR

SEQ ID NO: 67336 - protein, 268 aa, Unidentified
QVVPWGITRVQAPTVHNRGITGSGVKVAILDTGIAQHSDLTIRGGASFVPGESTTADLNGHGTHVAGTVAALNNSIGVIGVAPSADLYAVKVLGANGRGSVSGIAQGLEWAATNNMHIANMSLGSDAPSTTLERAVNYATSRGVLVIAATGNNGTGSIQYPARYANAMAVGATDQNNRRASFSQYGTGIDIVAPGVGIQSTYLNNSYASMSGTSMATPHVAGVAALVKQKNPSWNATQIRNHLKNTATNLGNSSQFGSGLVNADAATR

SEQ ID NO: 67337 - protein, 268 aa, Unidentified
QTVPWGITRVQAPAVHNRGITGSGVKVAILDSGISAHSDLNIRGGASFVPGEPTTADLNGHGTHVAGTVAALDNSIGVIGVAPNAELYAVKVLGANGRGSISGIAQGLEWAATNNMHVANMSLGTDAPSSTLERAVNYATSADVLVIAATGNNGSGSVSYPARYANAMAVGATDQNNRRANFSQYGTGIDIVAPGVNVQSTYPGNRYVSMSGTSMATPHVAGAAALVKQRYPSWNATQIRDHLKNTATNLGNSSQFGSGLVNAEAATR

SEQ ID NO: 67338 - protein, 378 aa, Bacillus sp.
MNKKMGKIVAGTALIISVAFSSSIAQAAEEAKEKYLIGFKEQEVMSQFVDQIDGAEYSISSQAEDVEIDLLHEFDFIPVLSVELDPEDVDALELDPAIAYIEEDAEVTTMQTVPWGINRVQAPIAQSRGFTGTGVRVAVLDTGISNHADLRIRGGASFVPGEPNISDGNGHGTQVAGTIAALNNSIGVLGVAPNVDLYGVKVLGASGSGSISGIAQGLQWAANNGMHIANMSLGSSAGSATMEQAVNQATASGVLVVAASGNSGAGNVGFPARYANAMAVGATDQNNNRATFSQYGAGLDIVAPGVGVQSTVPGNGYASFNGTSMATPHVAGVAALVKQKNPSWSNVQIRNHLKNTATNLGNTTQFGSGLVNAEAATR

SEQ ID NO: 67339 - protein, 347 aa, Unidentified
EVRRKYGVRASDLGSSSTISQIESGERRATRRLALEIVERLEEVVGDVEEVRELRELAEGNYVLDEVVEVETVEYEHEYLYDVTVVPDHTLVVENGIITSNSGVKVAVLDTGISTHPDLNIRGGASFVPGEPSTQDGNGHGTHVAGTIAALNNSIGVLGVAPSAELYAVKVLGASGSGSVSSIAQGLEWAGNNGMHVANLSLGSPSPSATLEQAVNSATSRGVLVVAASGNSGAGSISYPARYANAMAVGATDQNNNRASFSQYGAGLDIVAPGVNVQSTYPGSTYASLNGTSMATPHVAGAAALVKQKNPSWSNVQIRNHLKNTATSLGSTNLYGSGLVNAEAATR

SEQ ID NO: 67340 - protein, 269 aa, Unidentified
SQTVPWGITRVQAPTVHNRGITGSGVKVAILDTGIAQHSDLTIRGGASFVPGESTTADLNGHGTHVAGTVAALNNSIGVIGVAPSADLYAVKVLGANGRGSVSGIAQGLEWAATNNMHIANMSLGSDAPSTTLERAVNYATSRGVLVIAATGNNGTGSIGYPARYANAMAVGATDQNNRRASFSQYGTGIDIVAPGVGIQSTYLNNSYASMPGTSMATPHVAGVAALVKQKNPSWNATQIRNHLKNTATNLGNSSQFGSGLVNADAATR

SEQ ID NO: 67341 - protein, 268 aa, Unidentified
QTVPWGITRVQAPAVHNRGITGSGVRVAILDSGISTHEDLNVRGGVSFVPGETTYADLNGHGTHVAGTVAALNNSIGVVGVAPSADLYAVKVLGANGRGSVSGIAQGLEWAAQNNMHIANMSLGHEGPSSTLERAVNYATSRDVLVIAATGNNGSGSVGYPARYANAMAVGATDQNNRRANFSQYGTGIDIVAPGVNVQSTYPGNRYVSMNGTSMATPHVAGAAALVKQRYPSWNATQIRNHLKNTATNLGNSSQFGSGLVNAEAATR

SEQ ID NO: 67342 - protein, 268 aa, Unidentified
QTVPWGITRVQAPTVHNRGITGSGVKVAILDTGIAQHSDLTIRGGASFVPGESTTADLNGHGTHVAGTVAALNNSIGVIGVAPSADLYAVKVLGANGRGSVSGIAQGLEWAATNNMHIANMSLGSDAPSTTLERAVNYATSRGVLVIAATGNNGTGSIGYPARYANAMAVGATDQNNRRASFSQYGTGIDIVAPGVGIQSTYLNNSYASMPGTSMATPHVAGVAALVKQKNPSWNATQIRDHLKNTATNLGNSSQFGSGLVNADAATR

SEQ ID NO: 67343 - protein, 268 aa, Unidentified
QTVPWGIERVQAPTVHNRGITGSGVKVAILDTGIAQHSDLTIRGGASFVPGESTTADLNGHGTHVSGTVAALNNSIGVIGVAPSADLYAVKVLGANGRGSVSGIAQGLEWAATNNMHIANMSLGSDAPSTTLERAVNYATSRGVLVIAATGNNGTGSIGYPARYANAMAVGATDQNNRRASFSQYGTGIDIVAPGVGIQSTYLNNSYASMSGTSMATPHVAGVAALVKQKNPSWNATQIRNHLKNTATNLGNSSQFGSGLVNADAATR

SEQ ID NO: 67344 - protein, 268 aa, Unidentified
QTVPWGITRVQAPAVHNRGITGSGVRVAILDSGISTHEDLNVRGGVSFVPGEPTYADLNGHGTHVAGTVAALNNSIGVVGVAPSADLYAVKVLGANGRGSVSGIAQGLEWAAANNMHIANMSLGTDAPSSTLERAVNYATSADVLVIAATGNNGSGSVGYPARYANAMAVGATDQNNRRANFSQYGTGIDIVAPGVNVQSTYPGNRYVSMNGTSMATPHVAGAAALVKQRYPSWNATQIRNHLKNTATNLGNSSQFGSGLVNAEAATR

SEQ ID NO: 67345 - protein, 268 aa, Unidentified
QTVPWGITRVQAPAVHNRGITGSGVRVAILDSGISTHEDLNVRGGVSFVPGETTYADLNGHGTHVAGTVAALNNSIGVVGVAPSADLYAVKVLGANGRGSVSGIAQGLEWAATNNMHIANMSLGSEGPSSTLERAVNYATSRDVLVIAATGNNGSGSVGYPARYANAMAVGATDQNNRRANFSQYGTGIDIVAPGVNVQSTYPGNRYVSMNGTSMATPHVAGAAALVKQRYPSWNATQIRDHLKNTATNLGNSSQFGSGLVNAEAATR

SEQ ID NO: 67346 - protein, 268 aa, Unidentified
QTVPWGITRVQAPAVHNRGITGSGVRVAILDSGISTHEDLNVRGGVSFVPGEPGTADLNGHGTHVAGTVAALNNSIGVVGVAPSADLYAVKVLGANGRGSISGIAQGLEWAAANNMHIANMSLGTDAPSSTLERAVNYATSRDVLVIAATGNNGSGTVGYPARYANAMAVGATDQNNRRANFSQYGTGIDIVAPGVNVQSTYPGNRYVSMNGTSMATPHVAGAAALVKQRYPSWNATQIRNHLKNTATNLGNSSQFGSGLVNAEAATR

SEQ ID NO: 67347 - protein, 268 aa, Unidentified
QTVPWGITRVQAPAVHNRGITGSGVRVAILDSGISTHEDLNVRGGVSFVPGETTYADLNGHGTHVAGTVAALNNSIGVVGVAPSADLYAVKVLGANGEGSVSGIAQGLEWAAQNNMHIANMSLGAEGPSSTLERAVNYATSRDVLVIAATGNNGSGSVGYPARYANAMAVGATDQNNRRANFSQYGTGIDIVAPGVNVQSTYPGNRYVSMNGTSMATPHVAGAAALVKQRYPSWNATQIRNHLKNTATNLGNSSQFGSGLVNAEAATR

SEQ ID NO: 67348 - protein, 268 aa, Unidentified
QTVPWGITRVQAPTVHNRGITGSGVKVAILDTGIAQHSDLTIRGGAEFVPGESTTADLNGHGTHVAGTVAALNNSIGVIGVAPSADLYAVKVLGANGRGSVSGIAQGLEWAATNNMHIANMSLGSDAPSTTLERAVNYATSRGVLVIAATGNNGTGSIGYPARYANAMAVGATDQNNRRASFSQYGTGIDIVAPGVGIQSTYLNNSYASMPGTSMATPHVAGVAALVKQKNPSWNATQIRNHLKNTATNLGNSSQFGSGLVNADAATR

SEQ ID NO: 67349 - protein, 268 aa, Unidentified
QTVPWGITRVQAPTVHNRGITGSGVKVAILDTGIAQHSDLTIRGGASFVPGESTTADLNGHGTHVAGTVAALNNSIGVIGVAPSADLYAVKVLGANGRGSVSGIAQGLEWAATNNMHIANMSLGSDAESTTLERAVNYATSRGVLVIAATGNNGTGSIGYPARYANAMAVGATDQNNRRASFSQYGTGIDIVAPGVGIQSTYLNNSYASMPGTSMATPHVAGVAALVKQKNPSWNATQIRNHLKNTATNLGNSSQFGSGLVNADAATR

SEQ ID NO: 67350 - protein, 268 aa, Unidentified
QTVPWGITRVQAPAVHNRGITGSGVRVAILDSGISTHEDLNVRGGVSFVPGEPGTADLNGHGTHVAGTVAALNNSIGVVGVAPSADLYAVKVLGANGRGSISGIAQGLEWAAQNNMHIANMSLGTDAPSSTLERAVNYATSADVLVIAATGNNGSGSVGYPARYANAMAVGATDQNNRRANFSQYGTGIDIVAPGVNVQSTYPGNRYVSMNGTSMATPHVAGAAALVKQRYPSWNATQIRNHLKNTATNLGNSSQFGSGLVNAEAATR

SEQ ID NO: 67351 - protein, 268 aa, Unidentified
QTVPWGITRVQAPTVHNRGITGSGVKVAILDTGIAQHSDLTIRGGASFVPGESTTADLNGHGTHVAGTVAALNNSIGVIGVAPSADLKAVKVLGANGRGSVSGIAQGLEWAATNNMHIANMSLGSDAPSTTLERAVNYATSRGVLVIAATGNNGTGSIGYPARYANAMAVGATDQNNRRASFSQYGTGIDIVAPGVGIQSTYLNNSYASMPGTSMATPHVAGVAALVKQKNPSWNATQIRNHLKNTATNLGNSSQFGSGLVNADAATR

SEQ ID NO: 67352 - protein, 268 aa, Unidentified
QTVPWGIERVQAPTVHNRGITGSGVKVAILDTGIAQHSDLTIRGGASFVPGESTTADLNGHGTHVAGTVAALNNNIGVIGVAPSADLYAVKVLGANGRGSVSGIAQGLEWAATNNMHIANMSLGSDAPSTTLERAVNYATSRGVLVIAATGNNGTGSIGYPARYANAMAVGATDQNNRRASFSQYGTGIDIVAPGVGIQSTYLNNSYASMSGTSMATPHVAGVAALVKQKNPSWNATQIRNHLKNTATNLGNSSQFGSGLVNADAATR

SEQ ID NO: 67353 - protein, 268 aa, Unidentified
QTVPWGITRVQAPTVHNRGITGSGVKVAILDTGIAQHSDLTIRGGASFVPGESTTADLNGHGTHVSGTVAALNNSIGVIGVAPSADLYAVKVLGANGRGSVSGIAQGLEWAATNNMHIANMSLGSDAPSTTLERAVNYATSRGVLVIAATGNNGTGSIGYPARYANAMAVGATDQNNQRASFSQYGTGIDIVAPGVGIQSTYLNNSYASMPGTSMATPHVAGVAALVKQKNPSWNATQIRNHLKNTATNLGNSSQFGSGLVNADAATR

SEQ ID NO: 67354 - protein, 268 aa, Unidentified
QTVPWGITRVQAPTVHNRGITGSGVKVAILDTGIAQHSDLTIRGGASFVPGESTTADLNGHGTHVAGTVAALNNSIGVIGVAPSADLIAVKVLGANGRGSVSGIAQGLEWAATNNMHIANMSLGSDAPSTTLERAVNYATSRGVLVIAATGNNGTGSIGYPARYANAMAVGATDQNNRRASFSQYGTGIDIVAPGVGIQSTYLNNSYASMPGTSMATPHVAGVAALVKQKNPSWNATQIRNHLKNTATNLGNSSQFGSGLVNADAATR

SEQ ID NO: 67355 - protein, 268 aa, Unidentified
QTVPWGITRVQAPTVHNRGITGSGVKVAILDTGIAQLSDLTIRGGASFVPGESTTADLNGHGTHVAGTVAALNNSIGVIGVAPSADLYAVKVLGANGRGSVSGIAQGLEWAATNNMHIANMSLGSDAPSTTLERAVNYATSRGVLVIAATGNNGTGSIGYPARYANAMAVGATDQNNRRASFSQYGTGIDIVAPGVGIQSTYLNNSYASMPGTSMATPHVAGVAALVKQKNPSWNATQIRNHLKNTATNLGNSSQFGSGLVNADAATR

SEQ ID NO: 67356 - protein, 268 aa, Unidentified
QTVPWGITRVQAPTVHNRGITGSGVKVAILDTGIAQHSDLTIRGGASFVPGESTTAHLNGHGTHVAGTVAALNNSIGVIGVAPSADLYAVKVLGANGRGSVSGIAQGLEWAATNNMHIANMSLGSDAPSTTLERAVNYATSRGVLVIAATGNNGTGSIGYPARYANAMAVGATDQNNRRASFSQYGTGIDIVAPGVGIQSTYLNNSYASMPGTSMATPHVAGVAALVKQKNPSWNATQIRNHLKNTATNLGNSSQFGSGLVNADAATR

SEQ ID NO: 67357 - protein, 268 aa, Unidentified
QTVPWGITRVQAPTVHNRGITGSGVKVAILDTGIAQHSDLTIRGGASFVPGESTTAFLNGHGTHVAGTVAALNNSIGVIGVAPSADLYAVKVLGANGRGSVSGIAQGLEWAATNNMHIANMSLGSDAPSTTLERAVNYATSRGVLVIAATGNNGTGSIGYPARYANAMAVGATDQNNRRASFSQYGTGIDIVAPGVGIQSTYLNNSYASMPGTSMATPHVAGVAALVKQKNPSWNATQIRNHLKNTATNLGNSSQFGSGLVNADAATR

SEQ ID NO: 67358 - protein, 268 aa, Unidentified
QTIPWGISRVQAPAVHNRGITGSGVRVAILDSGISTHEDLNVRGGVSFVPGEPTTADLNGHGTHVAGTVAALNNSIGVVGVAPSADLYAVKVLGANGRGSVSGIAQGLEWAAANNMHIASMSLGSDAPSSTLERAVNYATSQDVLVIAATGNNGSGSVGYPARYANAMAVGATDQNNRRANFSQYGTGIDIVAPGVNVQSTYPGNRYVSMNGTSMATPHVAGIAALVKQKYPSWNATQIRNHLLNTATNLGNSSQFGSGLVNAEAATR

SEQ ID NO: 67359 - protein, 268 aa, Unidentified
QTVPWGITRVQAPAVHNRGITGSGVRVAILDSGISTHEDLNVRGGVSFVPGEPTTADLNGHGTHVAGTVAALNNSIGVVGVAPSADLYAVKVLGANGRGSVSGIAQGLEWAAANNMHIANMSLGSDAPSSTLERAVNYATSQDVLVIAATGNNGSGSVGYPARYANAMAVGATDQNNRRANFSQYGTGIDIVAPGVNVQSTYPGNRYVSMSGTSMATPHVAGVAALVKQRNPSWNATQIRNHLLSTATNLGNSNQFGSGLVNAEAATR

SEQ ID NO: 67360 - protein, 268 aa, Unidentified
QTVPWGITRVQAPTVHNRGITGSGVKVAILDTGIAQHSDLTIRGGASFVPGESTTADLNGHGTHVAGTVAALNNWIGVIGVAPSADLYAVKVLGANGRGSVSGIAQGLEWAATNNMHIANMSLGSDAPSTTLERAVNYATSRGVLVIAATGNNGTGSIGYPARYANAMAVGATDQNNRRASFSQYGTGIDIVAPGVGIQSTYLNNSYASMPGTSMATPHVAGVAALVKQKNPSWNATQIRNHLKNTATNLGNSSQFGSGLVNADAATR

SEQ ID NO: 67361 - protein, 268 aa, Unidentified
QTVPWGITRVQAPTVHNRGITGSGVKVAILDTGIAQFSDLTIRGGASFVPGESTTADLNGHGTHVAGTVAALNNSIGVIGVAPSADLYAVKVLGANGRGSVSGIAQGLEWAATNNMHIANMSLGSDAPSTTLERAVNYATSRGVLVIAATGNNGTGSIGYPARYANAMAVGATDQNNRRASFSQYGTGIDIVAPGVGIQSTYLNNSYASMPGTSMATPHVAGVAALVKQKNPSWNATQIRNHLKNTATNLGNSSQFGSGLVNADAATR

SEQ ID NO: 67362 - protein, 268 aa, Unidentified
QTVPWGITRVQAPAVHNRGITGSGVRVAILDSGISTHEDLNVRGGVSFVPGETTYADLNGHGTHVAGTVAALNNSIGVVGVAPSADLYAVKVLGANGRGSVSGIAQGLEWAAINNMHIANMSLGAEGPSSTLERAVNYATSRDVLVIAATGNNGSGSVGYPARYANAMAVGATDQNNRRANFSQYGTGIDIVAPGVNVQSTYPGNRYVSMNGTSMATPHVAGAAALVKQRYPSWNATQIRNHLKNTATNLGNSSQFGSGLVNAEAATR

SEQ ID NO: 67363 - protein, 268 aa, Bacillus gibsonii
QTVPWGITRVQAPTVHNRGITGSGVKVAILDTGIAQHSDLTIRGGASFVPGESTTADLNGHGTHVAGTVAALNNSIGVIGVAPSADLYAVKVLGAFGLGTISGIAQGLEWAATNNMHIANMSLGSDAPSTTLERAVNYATSRGVLVIAATGNEGTGSIRYPARYANAMAVGATDQNNRRASFSQYGPGIDIVAPGVGIQSTYLNNSYASLDGTSMATPHVAGVAALVKQKNPSWNATQIRNHLKNTATNLGNSSQFGSGLVNADAATR

SEQ ID NO: 67364 - protein, 268 aa, Unidentified
QVVPWGITRVQAPTVHNRGITGSGVKVAILDTGIAQHSDLTIRGGASFVPGESTTADLNGHGTHVSGTVAALNNSIGVIGVAPSADLYAVKVLGANGRGSVSGIAQGLEWAATNNMHIANMSLGSDAPSTTLERAVNYATSRGVLVIAATGNNGTGSIGYPARYANAMAVGATDQNNQRASFSQYGTGIDIVAPGVGIQSTYLNNSYASMPGTSMATPHVAGVAALVKQKNPSWNATQIRNHLKNTATNLGPSSQFGSGLVNADAATR

SEQ ID NO: 67365 - protein, 268 aa, Unidentified
QTVPWGIERVQAPTVHNRGITGSGVKVAILDTGIAQHSDLTIRGGASFVPGESTTADLNGHGTHVAGTVAALNNNIGVIGVAPSADLYAVKVLGANGRGSVSGIAQGLEWAATNNMHIANMSLGSDAPSTTLERAVNYATSRGVLVIAATGNNGTGSIGYPARYANAMAVGATDQNNRRASFSQYGTGIDIVAPGVGIQSTYLNNSYASMPGTSMATPHVAGVAALVKQKNPSWNATQIRNHLKNTATNLGNSSQFGSGLVNADAATR

SEQ ID NO: 67366 - protein, 268 aa, Unidentified
QTVPWGITRVQAPTVHNRGITGSGVKVAILDTGIAQHSDLTIRGGASFVPGESTTADLNGHGTHVAGTVAALNNSIGVIGVAPSADLYAVKVLGANGRGSVSGIAQGLEWAATNNMHIANMSLGSDAPFTTLERAVNYATSRGVLVIAATGNNGTGSIGYPARYANAMAVGATDQNNRRASFSQYGTGIDIVAPGVGIQSTYLNNSYASMPGTSMATPHVAGVAALVKQKNPSWNATQIRNHLKNTATNLGNSSQFGSGLVNADAATR

SEQ ID NO: 67367 - protein, 268 aa, Unidentified
QTVPWGITRVQAPTVHNRGITGSGVKVAILDTGIAQHSDLTIRGGASFVPGESTTADLNGHGTHVAGTVAALNNSIGVIGVAPSADLYAVKVLGANGRGVVSGIAQGLEWAATNNMHIANMSLGSDAPSTTLERAVNYATSRGVLVIAATGNNGTGSIGYPARYANAMAVGATDQNNRRASFSQYGTGIDIVAPGVGIQSTYLNNSYASMPGTSMATPHVAGVAALVKQKNPSWNATQIRNHLKNTATNLGNSSQFGSGLVNADAATR

SEQ ID NO: 67368 - protein, 268 aa, Unidentified
QTVPWGITRVQAPTVHNRGITGSGVKVAILDTGIAQHSDLTIRGGASFVPGESTTADLNGHGTHVAGTVAALDNSIGVIGVAPSADLYAVKVLGANGRGSVSGIAQGLEWAATNNMHIANMSLGSDAPSTTLERAVNYATSRGVLVIAATGNNGTGSIGYPARYANAMAVGATDQNNQRASFSQYGTGIDIVAPGVGIQSTYLNNSYASMPGTSMATPHVAGVAALVKQKNPSWNATQIRNHLKNTATNLGNSSQFGSGLVNADAATR

SEQ ID NO: 67369 - protein, 268 aa, Unidentified
QTVPWGITRVQAPTVHNRGITGSGVKVAILDTGIAQHSDLTIRGGAKFVPGESTTADLNGHGTHVAGTVAALNNSIGVIGVAPSADLYAVKVLGANGRGSVSGIAQGLEWAATNNMHIANMSLGSDAPSTTLERAVNYATSRGVLVIAATGNNGTGSIGYPARYANAMAVGATDQNNRRASFSQYGTGIDIVAPGVGIQSTYLNNSYASMPGTSMATPHVAGVAALVKQKNPSWNATQIRNHLKNTATNLGNSSQFGSGLVNADAATR

SEQ ID NO: 67370 - protein, 268 aa, Unidentified
QTVPWGITRVQAPAVHNRGITGSGVRVAILDSGISTHEDLNVRGGVSFVPGEPTYADLNGHGTHVAGTVAALNNSIGVVGVAPSADLYAVKVLGANGRGSVSGIAQGLEWAAQNNMHIANMSLGVGAPSSTLERAVNYATSRDVLVIAATGNNGSGSVGYPARYANAMAVGATDQNNRRANFSQYGTGIDIVAPGVNVQSTYPGNRYVSMNGTSMATPHVAGAAALVKQRYPSWNATQIRDHLKNTATNLGNSSQFGSGLVNAEAATR

SEQ ID NO: 67371 - protein, 268 aa, Unidentified
QTVPWGITRVQAPAVHNRGITGSGVRVAILDSGISTHEDLNVRGGVSFVPGEPTTADLNGHGTHVAGTVAALNNSIGVVGVAPSADLYAVKVLGANGRGSVSGIAQGLEWAAQNNMHIANMSLGTDAPSSTLERAVNYATSADVLVIAATGNNGSGSVGYPARYANAMAVGATDQNNRRANFSQYGTGIDIVAPGVNVQSTYPGNRYVSMNGTSMATPHVAGAAALVKQRYPSWNATQIRDHLKNTATNLGNSSQFGSGLVNAEAATR

SEQ ID NO: 67372 - protein, 268 aa, Unidentified
QTVPWGIERVQAPTVHNRGITGSGVKVAILDTGIAQHEDLTIRGGASFVPGESTTADLNGHGTHVAGTVAALNNNIGVIGVAPSADLYAVKVLGANGRGSVSGIAQGLEWAATNNMHIANMSLGSDAPSTTLERAVNYATSRGVLVIAATGNNGTGSIGYPARYANAMAVGATDQNNRRASFSQYGTGIDIVAPGVGIQSTYLNNSYASMPGTSMATPHVAGVAALVKQKNPSWNATQIRNHLKNTATNLGNSSQFGSGLVNADAATR

SEQ ID NO: 67373 - protein, 268 aa, Unidentified
QVVPWGITRVQAPTVHNRGITGSGVKVAILDTGIAQHSDLTIRGGASFVPGESTTADLNGHGTHVAGTVAALDNSIGVIGVAPSADLYAVKVLGANGRGSVSGIAQGLEWAATNNMHIANMSLGSDAPSTTLERAVNYATSRGVLVIAATGNNGTGSIGYPARYANAMAVGATDQNNRRASFSQYGTGIDIVAPGVGIQSTYLNNSYASMSGTSMATPHVAGVAALVKQKNPSWNATQIRNHLKNTATNLGNSSQFGSGLVNADAATR

SEQ ID NO: 67374 - protein, 268 aa, Unidentified
QTVPWGITRVQAPTVHNRGITGSGVKVAILDTGIAQHSDLTIRGGASFVPGESTTADLNGHGTHVAGTVAALNNNIGVIGVAPSADLYAVKVLGANGRGSVSGIAQGLEWAATNNMHIANMSLGSDAPSTTLERAVNYATSRGVLVIAATGNNGTGSIGYPARYANAMAVGATDQNNQRASFSQYGTGIDIVAPGVGIQSTYLNNSYASMPGTSMATPHVAGVAALVKQKNPSWNATQIRNHLKNTATNLGNSSQFGSGLVNADAATR

SEQ ID NO: 67375 - protein, 268 aa, Unidentified
QTVPWGITRVQAPTVHNRGITGSGVKVAILDTGIAQHSHLTIRGGASFVPGESTTADLNGHGTHVAGTVAALNNSIGVIGVAPSADLYAVKVLGANGRGSVSGIAQGLEWAATNNMHIANMSLGSDAPSTTLERAVNYATSRGVLVIAATGNNGTGSIGYPARYANAMAVGATDQNNRRASFSQYGTGIDIVAPGVGIQSTYLNNSYASMPGTSMATPHVAGVAALVKQKNPSWNATQIRNHLKNTATNLGNSSQFGSGLVNADAATR

SEQ ID NO: 67376 - protein, 268 aa, Unidentified
QTVPWGITRVQAPAVHNRGITGSGVRVAILDSGISTHEDLNVRGGVSFVPGEPTYADLNGHGTHVAGTVAALNNSIGVVGVAPSADLYAVKVLGANGTGSVSGIAQGLEWAAQNNMHIANMSLGGGTPSSTLERAVNYATSRDVLVIAATGNNGSGSVGYPARYANAMAVGATDQNNRRANFSQYGTGIDIVAPGVNVQSTYPGNRYVSMNGTSMATPHVAGAAALVKQRYPSWNATQIRDHLKNTATNLGNSSQFGSGLVNAEAATR

SEQ ID NO: 67377 - protein, 268 aa, Unidentified
QTVPWGITRVQAPAVHNRGITGSGVRVAILDSGISTHEDLNVRGGVSFVPGEPTYADLNGHGTHVAGTVAALNNSIGVVGVAPSADLYAVKVLGANGTGSVSGIAQGLEWAAQNNMHIANMSLGVEKPSSTLERAVNYATSRDVLVIAATGNNGSGSVGYPARYANAMAVGATDQNNRRANFSQYGTGIDIVAPGVNVQSTYPGNRYVSMNGTSMATPHVAGAAALVKQRYPSWNATQIRDHLKNTATNLGNSSQFGSGLVNAEAATR

SEQ ID NO: 67378 - protein, 268 aa, Unidentified
QTVPWGITRVQAPAVHNRGITGSGVRVAILDSGISTHEDLNVRGGVSFVPGETTYADLNGHGTHVAGTVAALNNSIGVVGVAPSADLYAVKVLGANGRGSVSGIAQGLEWAAQNNMHIANMSLGLPGPSSTLERAVNYATSRDVLVIAATGNNGSGSVGYPARYANAMAVGATDQNNRRANFSQYGTGIDIVAPGVNVQSTYPGNRYVSMNGTSMATPHVAGAAALVKQRYPSWNATQIRDHLKNTATNLGNSSQFGSGLVNAEAATR

SEQ ID NO: 67379 - protein, 268 aa, Unidentified
QTVPWGITRVQAPTVHNRGITGSGVKVAILDTGIAQHSDLTIRGGASFVPGESTTADLNGHGTHVAGTVAALNNSIGVIGVAPSADLYAVKVLGANGRGSVSGIAQGLEWAATNNMHIANMSLGSDAPQTTLERAVNYATSRGVLVIAATGNNGTGSIGYPARYANAMAVGATDQNNRRASFSQYGTGIDIVAPGVGIQSTYLNNSYASMPGTSMATPHVAGVAALVKQKNPSWNATQIRNHLKNTATNLGNSSQFGSGLVNADAATR

SEQ ID NO: 67380 - protein, 268 aa, Unidentified
QTVPWGITRVQAPTVHNRGITGSGVKVAILDTGIAQHSDLTIRGGASFVPGESTTADLNGHGTHVAGTVAALNNVIGVIGVAPSADLYAVKVLGANGRGSVSGIAQGLEWAATNNMHIANMSLGSDAPSTTLERAVNYATSRGVLVIAATGNNGTGSIGYPARYANAMAVGATDQNNRRASFSQYGTGIDIVAPGVGIQSTYLNNSYASMPGTSMATPHVAGVAALVKQKNPSWNATQIRNHLKNTATNLGNSSQFGSGLVNADAATR

SEQ ID NO: 67381 - protein, 268 aa, Unidentified
QTVPWGITRVQAPAVHNRGITGSGVRVAILDSGISTHEDLNVRGGVSFVPGETTYADLNGHGTHVAGTVAALNNSIGVVGVAPSADLYAVKVLGANGRGSVSGIAQGLEWAAQNNMHIANMSLGAEGPSSTLEQAVNYATSRDVLVIAATGNNGSGSVGYPARYANAMAVGATDQNNRRANFSQYGTGIDIVAPGVNVQSTYPGNRYVSMNGTSMATPHVAGAAALVKQRYPSWNATQIRDHLKNTATNLGNSSQFGSGLVNAEAATR

SEQ ID NO: 67382 - protein, 268 aa, Unidentified
QTVPWGITRVQAPAVHNRGITGSGVRVAILDSGISTHEDLNVRGGVSFVPGEPTYADLNGHGTHVAGTVAALNNSIGVIGVAPSADLYAVKVLGANGRGSVSGIAQGLEWAATNNMHIANMSLGAEGPSSTLERAVNYATSRDVLVIAATGNNGSGSVGYPARYANAMAVGATDQNNRRANFSQYGTGIDIVAPGVNVQSTYPGNRYVSMNGTSMATPHVAGAAALVKQRYPSWNATQIRDHLKNTATNLGNSSQFGSGLVNAEAATR

SEQ ID NO: 67383 - protein, 268 aa, Unidentified
QTVPWGITRVQAPTVHNRGITGSGVKVAILDTGIAQHSDLTIRGGASFVPGESTTADLNGHGTHVAGTVAALNNSIGVIGVAPSADLTAVKVLGANGRGSVSGIAQGLEWAATNNMHIANMSLGSDAPSTTLERAVNYATSRGVLVIAATGNNGTGSIGYPARYANAMAVGATDQNNRRASFSQYGTGIDIVAPGVGIQSTYLNNSYASMPGTSMATPHVAGVAALVKQKNPSWNATQIRNHLKNTATNLGNSSQFGSGLVNADAATR

SEQ ID NO: 67384 - protein, 268 aa, Unidentified
QVVPWGITRVQAPTVHNRGITGSGVKVAILDTGIAQHEDLTIRGGASFVPGESTTADLNGHGTHVAGTVAALNNNIGVIGVAPSADLYAVKVLGANGRGSVSGIAQGLEWAATNNMHIANMSLGSDAPSTTLERAVNYATSRGVLVIAATGNNGTGSIGYPARYANAMAVGATDQNNRRASFSQYGTGIDIVAPGVGIQSTYLNNSYASMPGTSMATPHVAGVAALVKQKNPSWNATQIRNHLKNTATNLGNSSQFGSGLVNADAATR

SEQ ID NO: 67385 - protein, 268 aa, Unidentified
QTVPWGITRVQAPAVHNRGITGSGVRVAILDSGISTHEDLNVRGGVSFVPGETTYADLNGHGTHVAGTVAALNNSIGVVGVAPSADLYAVKVLGANGRGSVSGIAQGLEWAAFNNMHIANMSLGAEGPSSTLERAVNYATSRDVLVIAATGNNGSGSVGYPARYANAMAVGATDQNNRRANFSQYGTGIDIVAPGVNVQSTYPGNRYVSMNGTSMATPHVAGAAALVKQRYPSWNATQIRNHLKNTATNLGNSSQFGSGLVNAEAATR

SEQ ID NO: 67386 - protein, 268 aa, Unidentified
QTVPWGITRVQAPTVHNRGITGQGVKVAILDTGIAQHSDLTIRGGASFVPGESTTADLNGHGTHVAGTVAALNNSIGVIGVAPSADLYAVKVLGANGRGSVSGIAQGLEWAATNNMHIANMSLGSDAPSTTLERAVNYATSRGVLVIAATGNNGTGSIGYPARYANAMAVGATDQNNRRASFSQYGTGIDIVAPGVGIQSTYLNNSYASMPGTSMATPHVAGVAALVKQKNPSWNATQIRNHLKNTATNLGNSSQFGSGLVNADAATR

SEQ ID NO: 67387 - protein, 268 aa, Unidentified
QTVPWGITRVQAPTVHNRGITGSGVKVAILDTGIAQHSKLTIRGGASFVPGESTTADLNGHGTHVAGTVAALNNSIGVIGVAPSADLYAVKVLGANGRGSVSGIAQGLEWAATNNMHIANMSLGSDAPSTTLERAVNYATSRGVLVIAATGNNGTGSIGYPARYANAMAVGATDQNNRRASFSQYGTGIDIVAPGVGIQSTYLNNSYASMPGTSMATPHVAGVAALVKQKNPSWNATQIRNHLKNTATNLGNSSQFGSGLVNADAATR

SEQ ID NO: 67388 - protein, 268 aa, Unidentified
QTVPWGITRVQAPTVHNRGITGSGVKVAILDTGIAQHSDLTIRGGASFVPGESTTADLNGHGTHVAGTVAALNNSIGVIGVAPSADLYAVKVLGANGRGSVSGIAQGLEWAATNNMHIANMSLGSDAPATTLERAVNYATSRGVLVIAATGNNGTGSIGYPARYANAMAVGATDQNNRRASFSQYGTGIDIVAPGVGIQSTYLNNSYASMPGTSMATPHVAGVAALVKQKNPSWNATQIRNHLKNTATNLGNSSQFGSGLVNADAATR

SEQ ID NO: 67389 - protein, 268 aa, Unidentified
QTVPWGITRVQAPTVHNRGITGSGVKVAILDTGIAQHSDLTIRGGASFVPGESTTADLNGHGTHVAGTVAALNNSIGVIGVAPSADLYAVKVLGANGRGSVSGIAQGLEWAATNNMHIANMSLGSDAPSTTLERAVNYATSRGVLVIAATGNNGTGSIGYPARYANAMAVGATDQNNRRASFSQYGTGIDIVAPGVGIQSTYLNNSYASMPGTSMATPHVAGVAALVKQKNPSWNATQIRNHLKNTVTNLGNSSQFGSGLVNADAATR

SEQ ID NO: 67390 - protein, 268 aa, Unidentified
QTVPWGITRVQAPAVHNRGITGSGVRVAILDSGISTHEDLNVRGGVSFVPGEPTYADLNGHGTHVAGTVAALNNSIGVIGVAPSADLYAVKVLGANGRGSVSGIAQGLEWAAQNNMHIANMSLGAEGPSSTLERAVNYATSRDVLVIAATGNNGSGSVGYPARYANAMAVGATDQNNRRANFSQYGTGIDIVAPGVNVQSTYPGNRYVSMNGTSMATPHVAGAAALVKQRYPSWNATQIRDHLKNTATNLGNSSQFGSGLVNAEAATR

SEQ ID NO: 67391 - protein, 268 aa, Unidentified
QTVPWGITRVQAPTVHNRGITGSGVKVAILDTGIAQHSDLTIRGGARFVPGESTTADLNGHGTHVAGTVAALNNSIGVIGVAPSADLYAVKVLGANGRGSVSGIAQGLEWAATNNMHIANMSLGSDAPSTTLERAVNYATSRGVLVIAATGNNGTGSIGYPARYANAMAVGATDQNNRRASFSQYGTGIDIVAPGVGIQSTYLNNSYASMPGTSMATPHVAGVAALVKQKNPSWNATQIRNHLKNTATNLGNSSQFGSGLVNADAATR

SEQ ID NO: 67392 - protein, 268 aa, Unidentified
QTVPWGITRVQAPAVHNRGITGSGVRVAILDSGISTHEDLNVRGGVSFVPGEPTTADLNGHGTHVAGTVAALNNSIGVVGVAPSADLYAVKVLGANGRGSISGIAQGLEWAAQNNMHIANMSLGTDAPSSTLERAVNYATSRDVLVIAATGNNGSGSVGYPARYANAMAVGATDQNNRRANFSQYGTGIDIVAPGVNVQSTYPGNRYVSMNGTSMATPHVAGAAALVKQRYPSWNATQIRDHLKNTATNLGNSSQFGSGLVNAEAATR

SEQ ID NO: 67393 - protein, 268 aa, Unidentified
QTVPWGITRVQAPAVHNRGITGSGVRVAILDSGISTHEDLNVRGGVSFVPGETTYADLNGHGTHVAGTVAALNNSIGVVGVAPSAELYAVKVLGANGRGSVSGIAQGLEWAATNNMHIANMSLGAEGPSSTLERAVNYATSRDVLVIAATGNNGSGSVGYPARYANAMAVGATDQNNRRANFSQYGTGIDIVAPGVNVQSTYPGNRYVSMNGTSMATPHVAGAAALVKQRYPSWNATQIRDHLKNTATNLGNSSQFGSGLVNAEAATR

SEQ ID NO: 67394 - protein, 268 aa, Unidentified
QTVPWGITRVQAPTVHNRGITGSGVKVAILDTGIAQHSDLTIRGGASFVPGESTTADLNGHGTHVAGTVAALNNSIGVIGVAPSADLYAVKVLGANGRGSVSGIAQGLEWAATNNMHIANMSLGSDAPYTTLERAVNYATSRGVLVIAATGNNGTGSIGYPARYANAMAVGATDQNNRRASFSQYGTGIDIVAPGVGIQSTYLNNSYASMPGTSMATPHVAGVAALVKQKNPSWNATQIRNHLKNTATNLGNSSQFGSGLVNADAATR

SEQ ID NO: 67395 - protein, 268 aa, Unidentified
QVVPWGITRVQAPTVHNRGITGSGVKVAILDTGIAQHEDLTIRGGASFVPGESTTADLNGHGTHVSGTVAALNNSIGVIGVAPSADLYAVKVLGANGRGSVSGIAQGLEWAATNNMHIANMSLGSDAPSTTLERAVNYATSRGVLVIAATGNNGTGSIGYPARYANAMAVGATDQNNRRASFSQYGTGIDIVAPGVGIQSTYLNNSYASMPGTSMATPHVAGVAALVKQKNPSWNATQIRNHLKNTATNLGNSSQFGSGLVNADAATR

SEQ ID NO: 67396 - protein, 268 aa, Unidentified
QTVPWGITRVQAPTVHNRGITGSGVKVAILDTGIAQHSDLTIRGGASFVPGESTTADLNGHGTHVAGTVAALNNSIGVIGVAPSADLYAVKVLGANGRGPVSGIAQGLEWAATNNMHIANMSLGSDAPSTTLERAVNYATSRGVLVIAATGNNGTGSIGYPARYANAMAVGATDQNNRRASFSQYGTGIDIVAPGVGIQSTYLNNSYASMPGTSMATPHVAGVAALVKQKNPSWNATQIRNHLKNTATNLGNSSQFGSGLVNADAATR

SEQ ID NO: 67397 - protein, 268 aa, Unidentified
QTVPWGITRVQAPTVHNRGITGSGVKVAILDTGIAQHSDLTIRGGASFVPGESTTADLNGHGTHVAGTVAALNNSIGVIGVAPSADLGAVKVLGANGRGSVSGIAQGLEWAATNNMHIANMSLGSDAPSTTLERAVNYATSRGVLVIAATGNNGTGSIGYPARYANAMAVGATDQNNRRASFSQYGTGIDIVAPGVGIQSTYLNNSYASMPGTSMATPHVAGVAALVKQKNPSWNATQIRNHLKNTATNLGNSSQFGSGLVNADAATR

SEQ ID NO: 67398 - protein, 268 aa, Unidentified
QTVPWGITRVQAPTVHNRGITGSGVKVAILDTGIAQHSFLTIRGGASFVPGESTTADLNGHGTHVAGTVAALNNSIGVIGVAPSADLYAVKVLGANGRGSVSGIAQGLEWAATNNMHIANMSLGSDAPSTTLERAVNYATSRGVLVIAATGNNGTGSIGYPARYANAMAVGATDQNNRRASFSQYGTGIDIVAPGVGIQSTYLNNSYASMPGTSMATPHVAGVAALVKQKNPSWNATQIRNHLKNTATNLGNSSQFGSGLVNADAATR

SEQ ID NO: 67399 - protein, 268 aa, Unidentified
QTVPWGITRVQAPTVHNRGITGSGVKVAILDTGIAQHSDLTIRGGASFVPGESTTADLNGHGTHVAGTVAALNNSIGVIGVAPSADLYAVKVLGANGRGSVSGIAQGLEWAATNNMHIANMSLGSDAPGTTLERAVNYATSRGVLVIAATGNNGTGSIGYPARYANAMAVGATDQNNRRASFSQYGTGIDIVAPGVGIQSTYLNNSYASMPGTSMATPHVAGVAALVKQKNPSWNATQIRNHLKNTATNLGNSSQFGSGLVNADAATR

SEQ ID NO: 67400 - protein, 268 aa, Unidentified
QTVPWGITRVQAPTVHNRGITGSGVKVAILDTGIAQHSDLTIRGGASFVPGESTTADLNGHGTHVAGTVAALNNGIGVIGVAPSADLYAVKVLGANGRGSVSGIAQGLEWAATNNMHIANMSLGSDAPSTTLERAVNYATSRGVLVIAATGNNGTGSIGYPARYANAMAVGATDQNNRRASFSQYGTGIDIVAPGVGIQSTYLNNSYASMPGTSMATPHVAGVAALVKQKNPSWNATQIRNHLKNTATNLGNSSQFGSGLVNADAATR

SEQ ID NO: 67401 - protein, 268 aa, Unidentified
QTVPWGITRVQAPAVHNRGITGSGVRVAILDSGISTHEDLNVRGGVSFVPGEPTYADLNGHGTHVAGTVAALNNSIGVVGVAPSADLYAVKVLGANGAGSVSGIAQGLEWAAQNNMHIANMSLGMSAPSSTLERAVNYATSRDVLVIAATGNNGSGSVGYPARYANAMAVGATDQNNRRANFSQYGTGIDIVAPGVNVQSTYPGNRYVSMNGTSMATPHVAGAAALVKQRYPSWNATQIRDHLKNTATNLGNSSQFGSGLVNAEAATR

SEQ ID NO: 67402 - protein, 268 aa, Unidentified
QTVPWGITRVQAPAVHNRGITGSGVRVAILDSGISTHEDLNVRGGVSFVPGETTYADLNGHGTHVAGTVAALNNSIGVVGVAPSADLYAVKVLGANGSGSVSGIAQGLEWAATNNMHIANMSLGAEGPSSTLERAVNYATSRDVLVIAATGNNGSGSVGYPARYANAMAVGATDQNNRRANFSQYGTGIDIVAPGVNVQSTYPGNRYVSMNGTSMATPHVAGAAALVKQRYPSWNATQIRDHLKNTATNLGNSSQFGSGLVNAEAATR

SEQ ID NO: 67403 - protein, 268 aa, Unidentified
QTVPWGITRVQAPAVHNRGITGSGVRVAILDSGISTHEDLNIRGGASFVPGEPTTADLNGHGTHVAGTVAALNNSIGVIGVAPNAELYAVKVLGANGRGSISGIAQGLEWAAQNNMHIANMSLGTDAPSSTLERAVNYATSADVLVIAATGNNGSGSVGYPARYANAMAVGATDQNNRRANFSQYGTGIDIVAPGVNVQSTYPGNRYVSMSGTSMATPHVAGAAALVKQRYPSWNATQIRDHLKNTATNLGNSSQFGSGLVNAEAATR

SEQ ID NO: 67404 - protein, 268 aa, Unidentified
QTVPWGITRVQAPAVHNRGITGSGVRVAILDSGISTHEDLNVRGGVSFVPGEPTYADLNGHGTHVAGTVAALNNSIGVVGVAPSADLYAVKVLGANGRGSVSGIAQGLEWAATNNMHIANMSLGAEGPSSTLERAVNYATSRDVLVIAATGNNGSGSVGYPARYANAMAVGATDQNNRRANFSQYGTGIDIVAPGVNVQSTYPGNRYVSMNGTSMATPHVAGAAALVKQRYPSWNATQIRDHLKNTATNLGNSSQFGSGLVNAEAATR

SEQ ID NO: 67405 - protein, 268 aa, Unidentified
QTVPWGITRVQAPTVHNRGITGSGVKVAILDTGIAQHSDLTIRGGASFVPGESTTADLNGHGTHVAGTVAALNNSIGVIGVAPSADLYAVKVLGANGRGSVSGIAQGLEWAATNNMHIANMSLGSDAGSTTLERAVNYATSRGVLVIAATGNNGTGSIGYPARYANAMAVGATDQNNRRASFSQYGTGIDIVAPGVGIQSTYLNNSYASMPGTSMATPHVAGVAALVKQKNPSWNATQIRNHLKNTATNLGNSSQFGSGLVNADAATR

SEQ ID NO: 67406 - protein, 268 aa, Unidentified
QTVPWGITRVQAPAVHNRGITGSGVRVAILDSGISAHEDLNIRGGASFVPGETTYADLNGHGTHVAGTVAALDNSIGVVGVAPSADLYAVKVLGANGRGSVSGIAQGLEWAAQNNMHIANMSLGAEEPSSTLERAVNYATSRDVLVIAATGNNGSGSVGYPARYANAMAVGATDQNNRRANFSQYGTGIDIVAPGVNVQSTYPGNRYVSMNGTSMATPHVAGAAALVKQRYPSWNATQIRNHLKNTATNLGNSSQFGSGLVNAEAATR

SEQ ID NO: 67407 - protein, 268 aa, Unidentified
QTVPWGITRVQAPAVHNRGITGSGVRVAILDSGISTHEDLNVRGGVSFVPGETTYADLNGHGTHVAGTVAALNNSIGVVGVAPSADLYAVKVLGANGRGSVSGIAQGLEWAAQNNMHIANMSLGSITPSSTLERAVNYATSRDVLVIAATGNNGSGSVGYPARYANAMAVGATDQNNRRANFSQYGTGIDIVAPGVNVQSTYPGNRYVSMNGTSMATPHVAGAAALVKQRYPSWNATQIRDHLKNTATNLGNSSQFGSGLVNAEAATR

SEQ ID NO: 67408 - protein, 268 aa, Unidentified
QTVPWGITRVQAPTVHNRGITGSGVKVAILDTGIAQHSDLTIRGGASFVPGESTTADLNGHGTHVAGTVAALDNSIGVIGVAPSADLYAVKVLGANGRGSVSGIAQGLEWAATNNMHIANMSLGSDAPSTTLERAVNYATSRGVLVIAATGNNGTGSIQYPARYANAMAVGATDQNNRRASFSQYGTGIDIVAPGVGIQSTYLNNSYASMSGTSMATPHVAGVAALVKQKNPSWNATQIRNHLKNTATNLGNSSQFGSGLVNADAATR

SEQ ID NO: 67409 - protein, 268 aa, Unidentified
QTVPWGITRVQAPTVHNRGITGSGVKVAILDTGIAQVSDLTIRGGASFVPGESTTADLNGHGTHVAGTVAALNNSIGVIGVAPSADLYAVKVLGANGRGSVSGIAQGLEWAATNNMHIANMSLGSDAPSTTLERAVNYATSRGVLVIAATGNNGTGSIGYPARYANAMAVGATDQNNRRASFSQYGTGIDIVAPGVGIQSTYLNNSYASMPGTSMATPHVAGVAALVKQKNPSWNATQIRNHLKNTATNLGNSSQFGSGLVNADAATR

SEQ ID NO: 67410 - protein, 268 aa, Unidentified
QTVPWGITRVQAPTVHNRGITGSGVKVAILDTGIAQHSDLTIRGGASFVPGESTTADLNGHGTHVAGTVAALNNLIGVIGVAPSADLYAVKVLGANGRGSVSGIAQGLEWAATNNMHIANMSLGSDAPSTTLERAVNYATSRGVLVIAATGNNGTGSIGYPARYANAMAVGATDQNNRRASFSQYGTGIDIVAPGVGIQSTYLNNSYASMPGTSMATPHVAGVAALVKQKNPSWNATQIRNHLKNTATNLGNSSQFGSGLVNADAATR

SEQ ID NO: 67411 - protein, 268 aa, Unidentified
QVVPWGIERVQAPTVHNRGITGSGVKVAILDTGIAQHSDLTIRGGASFVPGESTTADLNGHGTHVSGTVAALNNSIGVIGVAPSADLYAVKVLGANGRGSVSGIAQGLEWAATNNMHIANMSLGSDAPSTTLERAVNYATSRGVLVIAATGNNGTGSIGYPARYANAMAVGATDQNNRRASFSQYGTGIDIVAPGVGIQSTYLNNSYASMPGTSMATPHVAGVAALVKQKNPSWNATQIRNHLKNTATNLGNSSQFGSGLVNADAATR

SEQ ID NO: 67412 - protein, 268 aa, Unidentified
QTVPWGITRVQAPTVHNRGITGSGVKVAILDTGIAQHSDLTIRGGASFVPGESTTADLNGHGTHVAGTVAALNNSIGVIGVAPSADLYAVKVLGANGRGSVSGIAQGLEWAATNNMHIANMSLGSDAPCTTLERAVNYATSRGVLVIAATGNNGTGSIGYPARYANAMAVGATDQNNRRASFSQYGTGIDIVAPGVGIQSTYLNNSYASMPGTSMATPHVAGVAALVKQKNPSWNATQIRNHLKNTATNLGNSSQFGSGLVNADAATR

SEQ ID NO: 67413 - protein, 268 aa, Unidentified
QTVPWGITRVQAPTVHNRGITGSGVKVAILDTGIAQHSDLTIRGGASFVPGESTTAPLNGHGTHVAGTVAALNNSIGVIGVAPSADLYAVKVLGANGRGSVSGIAQGLEWAATNNMHIANMSLGSDAPSTTLERAVNYATSRGVLVIAATGNNGTGSIGYPARYANAMAVGATDQNNRRASFSQYGTGIDIVAPGVGIQSTYLNNSYASMPGTSMATPHVAGVAALVKQKNPSWNATQIRNHLKNTATNLGNSSQFGSGLVNADAATR

SEQ ID NO: 67414 - protein, 268 aa, Unidentified
QTVPWGITRVQAPAVHNRGITGSGVRVAILDSGISTHEDLNVRGGVSFVPGETTYADLNGHGTHVAGTVAALNNSIGVVGVAPSADLYAVKVLGANGRGSVSGIAQGLEWAAQNNMHIANMSLGFEGPSSTLERAVNYATSRDVLVIAATGNNGSGSVGYPARYANAMAVGATDQNNRRANFSQYGTGIDIVAPGVNVQSTYPGNRYVSMNGTSMATPHVAGAAALVKQRYPSWNATQIRNHLKNTATNLGNSSQFGSGLVNAEAATR

SEQ ID NO: 67415 - protein, 268 aa, Unidentified
QTVPWGITRVQAPAVHNRGITGSGVRVAILDSGISTHEDLNVRGGVSFVPGEPGTADLNGHGTHVAGTVAALDNSIGVVGVAPNAELYAVKVLGANGRGSISGIAQGLEWAAQNNMHIANMSLGTDAPSSTLERAVNYATSRDVLVIAATGNNGSGSVGYPARYANAMAVGATDQNNRRANFSQYGTGIDIVAPGVNVQSTYPGNRYVSMNGTSMATPHVAGAAALVKQRYPSWNATQIRNHLKNTATNLGNSSQFGSGLVNAEAATR

SEQ ID NO: 67416 - protein, 268 aa, Unidentified
QTVPWGITRVQAPAVHNRGITGSGVRVAILDSGISTHEDLNVRGGVSFVPGETTYADLNGHGTHVAGTVAALNNSIGVVGVAPSADLYAVKVLGANGRGSVSGIAQGLEWAANNNMHIANMSLGAEGPSSTLERAVNYATSRDVLVIAATGNNGSGSVGYPARYANAMAVGATDQNNRRANFSQYGTGIDIVAPGVNVQSTYPGNRYVSMNGTSMATPHVAGAAALVKQRYPSWNATQIRDHLKNTATNLGNSSQFGSGLVNAEAATR

SEQ ID NO: 67417 - protein, 268 aa, Unidentified
QTVPWGITRVQAPAVHNRGITGSGVRVAILDSGISTHEDLNVRGGVSFVPGETTYADLNGHGTHVAGTVAALNNSIGVVGVAPSADLYAVKVLGANGRGSVSGIAQGLEWAAQNNMHIANMSLGSDFPSSTLERAVNYATSRDVLVIAATGNNGSGSVGYPARYANAMAVGATDQNNRRANFSQYGTGIDIVAPGVNVQSTYPGNRYVSMNGTSMATPHVAGAAALVKQRYPSWNATQIRDHLKNTATNLGNSSQFGSGLVNAEAATR

SEQ ID NO: 67418 - protein, 268 aa, Unidentified
QTVPWGITRVQAPTVHNRGITGSGVKVAILDTGIAQHSDLTIRGGASFVPGESTTADLNGHGTHVAGTVAALNNSIGVIGVAPSADLYAVKVLGANGRGTVSGIAQGLEWAATNNMHIANMSLGSDAPSTTLERAVNYATSRGVLVIAATGNNGTGSIGYPARYANAMAVGATDQNNRRASFSQYGTGIDIVAPGVGIQSTYLNNSYASMPGTSMATPHVAGVAALVKQKNPSWNATQIRNHLKNTATNLGNSSQFGSGLVNADAATR

SEQ ID NO: 67419 - protein, 268 aa, Unidentified
QTVPWGITRVQAPTVHNRGITGSGVKVAILDTGIAQHSDLTIRGGASFVPGESTTADLNGHGTHVSGTVAALNNSIGVIGVAPSADLYAVKVLGANGRGSVSGIAQGLEWAATNNMHIANMSLGSDAPSTTLERAVNYATSRGVLVIAATGNNGTGSIGYPARYANAMAVGATDQNNQRASFSQYGTGIDIVAPGVGIQSTYLNNSYASMPGTSMATPHVAGVAALVKQKNPSWNATQIRNHLKNTATNLGPSSQFGSGLVNADAATR

SEQ ID NO: 67420 - protein, 268 aa, Unidentified
QTVPWGITRVQAPAVHNRGITGSGVRVAILDSGISTHEDLNVRGGVSFVPGETTYADLNGHGTHVAGTVAALNNSIGVVGVAPSADLYAVKVLGANGRGSVSGIAQGLEWAALNNMHIANMSLGAEGPSSTLERAVNYATSRDVLVIAATGNNGSGSVGYPARYANAMAVGATDQNNRRANFSQYGTGIDIVAPGVNVQSTYPGNRYVSMNGTSMATPHVAGAAALVKQRYPSWNATQIRNHLKNTATNLGNSSQFGSGLVNAEAATR

SEQ ID NO: 67421 - protein, 268 aa, Unidentified
QTVPWGITRVQAPAVHNRGITGSGVRVAILDSGISTHEDLNVRGGVSFVPGETTYADLNGHGTHVAGTVAALNNSIGVVGVAPSADLYAVKVLGANGRGSVSGIAQGLEWAAQNNMHIANMSLGAEGPSSTLERAVNYATSRDVLVIAATGNNGSGSVGYPARYANAMAVGATDQNNRRANFSQYGTGIDIVAPGVNVQSTYPGNRYVSMNGTSMATPHVAGAAALVKQRYPSWNATQIRNHLKNTATNLGNSSQFGSGLVNAEAATR

SEQ ID NO: 67422 - protein, 268 aa, Unidentified
QTVPWGITRVQAPAVHNRGITGSGVRVAILDSGISTHEDLNVRGGVSFVPGETTYADLNGHGTHVAGTVAALNNSIGVIGVAPNAELYAVKVLGANGSGSVSGIAQGLEWAAQNNMHIANMSLGTDEPSSTLERAVNYATSRDVLVIAATGNNGSGSVGYPARYANAMAVGATDQNNRRANFSQYGTGIDIVAPGVNVQSTYPGNRYVSMNGTSMATPHVAGAAALVKQRYPSWNATQIRDHLKNTATNLGNSSQFGSGLVNAEAATR

SEQ ID NO: 67423 - protein, 268 aa, Unidentified
QTVPWGITRVQAPTVHNRGITGSGVKVAILDTGIAQHSDLTIRGGASFVPGESTTADLNGHGTHVAGTVAALNNSIGVIGVAPSADLYAVKVLGANGRGSVSGIAQGLEWAATNNMHIANMSLGSDAPSTTLERAVNYATSRGVLVIAATGNNGTGSIGYPARYANAMAVGATDQNNRRASFSQYGTGIDIVAPGVGIQSTYLNNSYASMPGTSMATPHVAGVAALVKQKNPSWNATQIRNHLKNTHTNLGNSSQFGSGLVNADAATR

SEQ ID NO: 67424 - protein, 268 aa, Unidentified
QTVPWGITRVQAPAVHNRGITGSGVRVAILDSGIAAHEDLNVRGGVSFVPGEPTTADLNGHGTHVAGTVAALDNSIGVVGVAPSADLYAVKVLGANGRGSVSGIAQGLEWAAANNMHIANMSLGSDAPSSTLERAVNYATSRDVLVIAATGNNGSGSVGYPARYANAMAVGATDQNNRRANFSQYGTGIDIVAPGVNVQSTYPGNRYVSMNGTSMATPHVAGVAALVKQRYPSWNATQIRNHLKNTATNLGNSNQFGSGLVNAEAATR

SEQ ID NO: 67425 - protein, 268 aa, Unidentified
QTVPWGITRVQAPAVHNRGITGSGVRVAILDSGISTHEDLNVRGGVSFVPGEPTTADLNGHGTHVAGTVAALDNSIGVIGVAPSADLYAVKVLGANGRGSVSGIAQGLEWAAANNMHIANMSLGSDAPSSTLERAVNYATSRDVLVIAATGNNGSGTVGYPARYANAMAVGATDQNNRRANFSQYGTGIDIVAPGVNVQSTYPGNRYVSMSGTSMATPHVAGAAALVKQRYPSWNATQIRNHLKNTATNLGNSSQFGSGLVNAEAATR

SEQ ID NO: 67426 - protein, 268 aa, Unidentified
QTVPWGITRVQAPAVHNRGITGSGVRVAILDSGISAHSDLNVRGGVSFVPGEPTTADLNGHGTHVAGTVAALNNSIGVIGVAPNAELYAVKVLGANGRGSVSGIAQGLEWAATNNMHIANMSLGTDFPSSTLERAVNYATSRDVLVIAATGNNGSGSVGYPARYANAMAVGATDQNNRRANFSQYGTGIDIVAPGVNVQSTYPGNRYVSMNGTSMATPHVAGAAALVKQRYPSWNATQIRDHLKNTATNLGNSSQFGSGLVNAEAATR

SEQ ID NO: 67427 - protein, 268 aa, Unidentified
QTVPWGITRVQAPTVHNRGITGSGVKVAILDTGIAQHSDLTIRGGASFVPGESTTADLNGHGTHVAGTVAALNNSIGVIGVAPSADLEAVKVLGANGRGSVSGIAQGLEWAATNNMHIANMSLGSDAPSTTLERAVNYATSRGVLVIAATGNNGTGSIGYPARYANAMAVGATDQNNRRASFSQYGTGIDIVAPGVGIQSTYLNNSYASMPGTSMATPHVAGVAALVKQKNPSWNATQIRNHLKNTATNLGNSSQFGSGLVNADAATR

SEQ ID NO: 67428 - protein, 268 aa, Unidentified
QTVPWGITRVLAPTVHNRGITGSGVKVAILDTGIAQHSDLTIRGGASFVPGESTTADLNGHGTHVAGTVAALNNSIGVIGVAPSADLYAVKVLGANGRGSVSGIAQGLEWAATNNMHIANLSLGSDAPSTTLERAVNYATSRGVLVIAATGNNGTGSIGYPARYANAMAVGATDQNNRRASFSQYGTGIDIVAPGVGIQSTYLNNSYASMPGTSMATPHVSGVAALVKQKNPSWNATQIRNHLKNTATNLGNSSQFGSGLVNADAATR

SEQ ID NO: 67429 - protein, 268 aa, Unidentified
QTVPWGITRVQAPTVHNRGITGSGVKVAILDTGIAQHSDLTIRGGASFVPGESTTADLNGHGTHVAGTVAALNNSIGVIGSAPSADLYAVKVLGANGRGSVSGIAQGLEWAATNNMHIANMSLGSDAPSTTLERAVNYATSRGVLVIAATGNNGTGSIGYPARYANAMAVGATDQNNRRASFSQYGTGIDIVAPGVGIQSTYLNNSYASMPGTSMATPHVAGVAALVKQKNPSWNATQIRNHLKNTATNLGNSSQFGSGLVNADAATR

SEQ ID NO: 67430 - protein, 268 aa, Unidentified
QTVPWGITRVQAPTVHNRGITGSGVKVAILDTGIAQHEDLTIRGGASFVPGESTTADLNGHGTHVAGTVAALNNNIGVIGVAPSADLYAVKVLGANGRGSVSGIAQGLEWAATNNMHIANMSLGSDAPSTTLERAVNYATSRGVLVIAATGNNGTGSIGYPARYANAMAVGATDQNNRRASFSQYGTGIDIVAPGVGIQSTYLNNSYASMPGTSMATPHVAGVAALVKQKNPSWNATQIRNHLKNTATNLGNSSQFGSGLVNADAATR

SEQ ID NO: 67431 - protein, 268 aa, Unidentified
QTVPWGITRVQAPTVHNRGITGSGVKVAILDTGIAQHSDLTIRGGASFVPGESTTADLNGHGTHVAGTVAALDNSIGVIGVAPSADLYAVKVLGANGRGSVSGIAQGLEWAATNNMHIANMSLGSDAPSTTLERAVNYATSRGVLVIAATGNNGTGSIGYPARYANAMAVGATDQNNRRASFSQYGTGIDIVAPGVGIQSTYLNNSYASMPGTSMATPHVAGVAALVKQKNPSWNATQIRNHLKNTATNLGPSSQFGSGLVNADAATR

SEQ ID NO: 67432 - protein, 268 aa, Bacillus gibsonii
QTVPWGITRVQAPTVHNRGITGSGVKVAILDTGIAQHSDLTIRGGASFVPGESTTADLNGHGTHVAGTVAALNNSIGVIGVAPSADLYAVKVLGAFGLGTISGIAQGLEWAATNNMHIANMSLGSDAPSTTLERAVNYATSRGVLVIAATGNNGTGSIGYPARYANAMAVGATDQNNRRASFSQYGTGIDIVAPGVGIQSTYLNNSYASLDGTSMATPHVAGVAALVKQKNPSWNATQIRNHLKNTATNLGNSSQFGSGLVNADAATR

SEQ ID NO: 67433 - protein, 268 aa, Unidentified
QTVPWGITRVQAPTVHNRGITGSGVKVAILDTGIAQHSDLTIRGGASFVPGESTTADLNGHGTHVAGTVAALNNSIGVIGVAPSADLYAVKVLGANGRGSVSGIAQGLEWAATNNMHIANMSLGSDAVSTTLERAVNYATSRGVLVIAATGNNGTGSIGYPARYANAMAVGATDQNNRRASFSQYGTGIDIVAPGVGIQSTYLNNSYASMPGTSMATPHVAGVAALVKQKNPSWNATQIRNHLKNTATNLGNSSQFGSGLVNADAATR

SEQ ID NO: 67434 - protein, 268 aa, Unidentified
QTVPWGITRVQAPTVHNRGITGSGVKVAILDTGIAQHSDLTIRGGASFVPGESTTAQLNGHGTHVAGTVAALNNSIGVIGVAPSADLYAVKVLGANGRGSVSGIAQGLEWAATNNMHIANMSLGSDAPSTTLERAVNYATSRGVLVIAATGNNGTGSIGYPARYANAMAVGATDQNNRRASFSQYGTGIDIVAPGVGIQSTYLNNSYASMPGTSMATPHVAGVAALVKQKNPSWNATQIRNHLKNTATNLGNSSQFGSGLVNADAATR

SEQ ID NO: 67435 - protein, 268 aa, Unidentified
QTVPWGITRVQAPAVHNRGITGSGVRVAILDSGISTHEDLNVRGGASFVPGETTYADLNGHGTHVAGTVAALNNSIGVVGVAPSADLYAVKVLGANGRGSVSGIAQGLEWAATNNMHIANMSLGAEGPSSTLERAVNYATSRDVLVIAATGNNGSGSVGYPARYANAMAVGATDQNNRRANFSQYGTGIDIVAPGVNVQSTYPGNRYVSMNGTSMATPHVAGAAALVKQRYPSWNATQIRDHLKNTATNLGNSSQFGSGLVNAEAATR

SEQ ID NO: 67436 - protein, 268 aa, Unidentified
QTVPWGITRVQAPTVHNRGITGSGVKVAILDTGIAQHSDLTIRGGASFVPGESTTADLNGHGTHVAGTVAALNNSIGVIGVAPSADLYAVKVLGANGRGYVSGIAQGLEWAATNNMHIANMSLGSDAPSTTLERAVNYATSRGVLVIAATGNNGTGSIGYPARYANAMAVGATDQNNRRASFSQYGTGIDIVAPGVGIQSTYLNNSYASMPGTSMATPHVAGVAALVKQKNPSWNATQIRNHLKNTATNLGNSSQFGSGLVNADAATR

SEQ ID NO: 67437 - protein, 268 aa, Unidentified
QTVPWGITRVQAPTVHNRGITGSGVKVAILDTGIAQDSDLTIRGGASFVPGESTTADLNGHGTHVAGTVAALNNSIGVIGVAPSADLYAVKVLGANGRGSVSGIAQGLEWAATNNMHIANMSLGSDAPSTTLERAVNYATSRGVLVIAATGNNGTGSIGYPARYANAMAVGATDQNNRRASFSQYGTGIDIVAPGVGIQSTYLNNSYASMPGTSMATPHVAGVAALVKQKNPSWNATQIRNHLKNTATNLGNSSQFGSGLVNADAATR

SEQ ID NO: 67438 - protein, 268 aa, Unidentified
QVVPWGITRVQAPTVHNRGITGSGVKVAILDTGIAQHSDLTIRGGASFVPGESTTADLNGHGTHVSGTVAALNNSIGVIGVAPSADLYAVKVLGANGRGSVSGIAQGLEWAATNNMHIANMSLGSDAPSTTLERAVNYATSRGVLVIAATGNNGTGSIGYPARYANAMAVGATDQNNRRASFSQYGTGIDIVAPGVGIQSTYLNNSYASMPGTSMATPHVAGVAALVKQKNPSWNATQIRNHLKNTATNLGNSSQFGSGLVNADAATR

SEQ ID NO: 67439 - protein, 268 aa, Unidentified
QTVPWGITRVQAPAVHNRGITGSGVRVAILDSGISTHEDLNVRGGVSFVPGETTYADLNGHGTHVAGTVAALNNSIGVVGVAPSADLYAVKVLGANGRGSVSGIAQGLEWAAQNNMHIANMSLGSDEPSSTLERAVNYATSRDVLVIAATGNNGSGSVGYPARYANAMAVGATDQNNRRANFSQYGTGIDIVAPGVNVQSTYPGNRYVSMNGTSMATPHVAGAAALVKQRYPSWNATQIRDHLKNTATNLGNSSQFGSGLVNAEAATR

SEQ ID NO: 67440 - protein, 268 aa, Unidentified
QTVPWGITRVQAPTVHNRGITGSGVKVAILDTGIAQHSDLTIRGGASFVPGESTTADLNGHGTHVAGTVAALNNSIGVIGVAPSADLYAVKVLGANGRGSVSGIAQGLEWAATNNMHIANMSLGSDAPHTTLERAVNYATSRGVLVIAATGNNGTGSIGYPARYANAMAVGATDQNNRRASFSQYGTGIDIVAPGVGIQSTYLNNSYASMPGTSMATPHVAGVAALVKQKNPSWNATQIRNHLKNTATNLGNSSQFGSGLVNADAATR

SEQ ID NO: 67441 - protein, 268 aa, Unidentified
QTVPWGITRVQAPTVHNRGITGSGVKVAILDTGIAQHSDLTIRGGASFVPGESTTADLNGHGTHVAGTVAALNNDIGVIGVAPSADLYAVKVLGANGRGSVSGIAQGLEWAATNNMHIANMSLGSDAPSTTLERAVNYATSRGVLVIAATGNNGTGSIGYPARYANAMAVGATDQNNRRASFSQYGTGIDIVAPGVGIQSTYLNNSYASMPGTSMATPHVAGVAALVKQKNPSWNATQIRNHLKNTATNLGNSSQFGSGLVNADAATR

SEQ ID NO: 67442 - protein, 268 aa, Unidentified
QTVPWGITRVQAPTVHNRGITGSGVKVAILDTGIAQHSDLTIRGGASFVPGESTTADLNGHGTHVAGTVAALNNSIGVIGVAPSADLYAVKVLGANGRGSVSGIAQGLEWAATNNMHIANMSLGSDAPSTTLERAVNYATSRGVLVIAATGNNGTGSIGYPARYANAMAVGATDQNNRRASFSQYGTGIDIVAPGVGIQSTYLNNSYASMPGTSMATPHVAGVAALVKQKNPSWNATQIRNHLKNTGTNLGNSSQFGSGLVNADAATR

SEQ ID NO: 67443 - protein, 268 aa, Unidentified
QTVPWGITRVQAPAVHNRGITGSGVRVAILDSGISAHEDLNVRGGVSFVPGEPTTADLNGHGTHVAGTVAALNNSIGVVGVAPSADLYAVKVLGANGRGSVSGIAQGLEWAAANNMHIANMSLGSDAPSSTLERAVNYATSRDVLVIAATGNNGSGSVGYPARYANAMAVGATDQNNRRANFSQYGTGIDIVAPGVNVQSTYPGNRYVSMNGTSMATPHVAGVAALVKQRYPSWNATQIRDHLKSTATNLGNSNQFGSGLVNAEAATR

SEQ ID NO: 67444 - protein, 268 aa, Unidentified
QTVPWGITRVQAPTVHNRGITGSGVKVAILDTGIAQHEDLTIRGGASFVPGESTTADLNGHGTHVAGTVAALDNSIGVIGVAPSADLYAVKVLGANGRGSVSGIAQGLEWAATNNMHIANMSLGSDAPSTTLERAVNYATSRGVLVIAATGNNGTGSIQYPARYANAMAVGATDQNNQRASFSQYGTGIDIVAPGVGIQSTYLNNSYASMPGTSMATPHVAGVAALVKQKNPSWNATQIRNHLKNTATNLGNSSQFGSGLVNADAATR

SEQ ID NO: 67445 - protein, 268 aa, Unidentified
QTVPWGITRVQAPTVHNRGITGSGVKVAILDTGIAQHSDLTIRGGASFVPGESTTADLNGHGTHVAGTVAALNNNIGVIGVAPSADLYAVKVLGANGRGSVSGIAQGLEWAATNNMHIANMSLGSDAPSTTLERAVNYATSRGVLVIAATGNNGTGSIGYPARYANAMAVGATDQNNQRASFSQYGTGIDIVAPGVGIQSTYLNNSYASMSGTSMATPHVAGVAALVKQKNPSWNATQIRNHLKNTATNLGPSSQFGSGLVNADAATR

SEQ ID NO: 67446 - protein, 268 aa, Unidentified
QTVPWGITRVQAPAVHNRGITGSGVRVAILDSGISAHEDLNIRGGVSFVPGEPTTADLNGHGTHVAGTVAALNNSIGVVGVAPNADLYAVKVLGANGRGSVSGIAQGLEWAAANNMHIANMSLGTDAPSSTLERAVNYATSRDVLVIAATGNNGSGSVGYPARYANAMAVGATDQNNRRANFSQYGTGIDIVAPGVNVQSTYPGNRYVSMNGTSMATPHVAGAAALVKQRYPSWNATQIRDHLKNTATNLGNSSQFGSGLVNAEAATR

SEQ ID NO: 67447 - protein, 268 aa, Unidentified
QTVPWGITRVQAPTVHNRGITGSGVKVAILDTGIAQHSRLTIRGGASFVPGESTTADLNGHGTHVAGTVAALNNSIGVIGVAPSADLYAVKVLGANGRGSVSGIAQGLEWAATNNMHIANMSLGSDAPSTTLERAVNYATSRGVLVIAATGNNGTGSIGYPARYANAMAVGATDQNNRRASFSQYGTGIDIVAPGVGIQSTYLNNSYASMPGTSMATPHVAGVAALVKQKNPSWNATQIRNHLKNTATNLGNSSQFGSGLVNADAATR

SEQ ID NO: 67448 - protein, 268 aa, Unidentified
QTVPWGITRVQAPTVHNRGITGSGVKVAILDTGIAQHSDLTIRGGASFVPGESTTADLNGHGTHVAGTVAALNNSIGVIGVAPSADLPAVKVLGANGRGSVSGIAQGLEWAATNNMHIANMSLGSDAPSTTLERAVNYATSRGVLVIAATGNNGTGSIGYPARYANAMAVGATDQNNRRASFSQYGTGIDIVAPGVGIQSTYLNNSYASMPGTSMATPHVAGVAALVKQKNPSWNATQIRNHLKNTATNLGNSSQFGSGLVNADAATR

SEQ ID NO: 67449 - protein, 268 aa, Unidentified
QTVPWGITRVQAPTVHNRGITGSGVKVAILDTGIAQHEDLTIRGGASFVPGESTTADLNGHGTHVSGTVAALNNSIGVIGVAPSADLYAVKVLGANGRGSVSGIAQGLEWAATNNMHIANMSLGSDAPSTTLERAVNYATSRGVLVIAATGNNGTGSIGYPARYANAMAVGATDQNNRRASFSQYGTGIDIVAPGVGIQSTYLNNSYASMSGTSMATPHVAGVAALVKQKNPSWNATQIRNHLKNTATNLGNSSQFGSGLVNADAATR

SEQ ID NO: 67450 - protein, 268 aa, Unidentified
QTVPWGITRVQAPTVHNRGITGSGVKVAILDTGIAQHSDLTIRGGASFVPGESTTADLNGHGTHVAGTVAALNNSIGVIGVAPSADLYAVKVLGANGRGSVSGIAQGLEWAATNNMHIANMSLGSDAPSTTLERAVNYATSRGVLVIAATGNNGTGSIGYPARYANAMAVGATDQNNRRASFSQYGTGIDIVAPGVGIQSTYLNNSYASMPGTSMATPHVAGVAALVKQKNPSWNATQIRNHLKNTYTNLGNSSQFGSGLVNADAATR

SEQ ID NO: 67451 - protein, 268 aa, Unidentified
QTVPWGITRVQAPAVHNRGITGSGVRVAILDSGISTHEDLNVRGGVSFVPGEPTYADLNGHGTHVAGTVAALNNSIGVVGVAPSADLYAVKVLGANGRGSVSGIAQGLEWAAQNNMHIANMSLGNGGPSSTLERAVNYATSRDVLVIAATGNNGSGSVGYPARYANAMAVGATDQNNRRANFSQYGTGIDIVAPGVNVQSTYPGNRYVSMNGTSMATPHVAGAAALVKQRYPSWNATQIRDHLKNTATNLGNSSQFGSGLVNAEAATR

SEQ ID NO: 67452 - protein, 268 aa, Bacillus gibsonii
QTVPWGITRVQAPTVHNRGITGSGVKVAILDTGIAQHSDLTIRGGASFVPGESTTADLNGHGTHVAGTVAALNNSIGVIGVAPSADLYAVKVLGAFGLGTISGIAQGLEWAATNNMHIANMSLGSDAPSTTLERAVNYATSRGVLVIAATGNNGTGSIGYPARYANAMAVGATDQNNRRASFSQYGPGIDIVAPGVGIQSTYLNNSYASLDGTSMATPHVAGVAALVKQKNPSWNATQIRNHLKNTATNLGNSSQFGSGLVNADAATR

SEQ ID NO: 67453 - protein, 268 aa, Unidentified
QTVPWGITRVQAPTVHNRGITGSGVKVAILDTGIAQHSDLTIRGGASFVPGESTTADLNGHGTHVAGTVAALNNSIGVIGVAPSADLYAVKVLGANGRGSVSGIAQGLEWAATNNMHIANMSLGSDAASTTLERAVNYATSRGVLVIAATGNNGTGSIGYPARYANAMAVGATDQNNRRASFSQYGTGIDIVAPGVGIQSTYLNNSYASMPGTSMATPHVAGVAALVKQKNPSWNATQIRNHLKNTATNLGNSSQFGSGLVNADAATR

SEQ ID NO: 67454 - protein, 268 aa, Unidentified
QVVPWGIERVQAPTVHNRGITGSGVKVAILDTGIAQHSDLTIRGGASFVPGESTTADLNGHGTHVAGTVAALDNSIGVIGVAPSADLYAVKVLGANGRGSVSGIAQGLEWAATNNMHIANMSLGSDAPSTTLERAVNYATSRGVLVIAATGNNGTGSIGYPARYANAMAVGATDQNNRRASFSQYGTGIDIVAPGVGIQSTYLNNSYASMPGTSMATPHVAGVAALVKQKNPSWNATQIRNHLKNTATNLGNSSQFGSGLVNADAATR

SEQ ID NO: 67455 - protein, 268 aa, Shouchella gibsonii
QTVPWGITRVQAPTVHNRGITGSGVKVAILDTGIAQHSDLTVRGGASFVPGESTTADLNGHGTHVAGTVAALNNSIGVIGVAPSADLYAVKVLGANGRGSVSGIAQGLEWAATNNMHIANMSLGSDAPSTTLERAVNYATSRGVLVIAATGNNGTGSIGYPARYANAMAVGATDQNNRRASFSQYGTGIDIVAPGVGIQSTYLNNSYASMPGTSMATPHVAGVAALVKQKNPSWNATQIRNHLKNTATNLGNSSQFGSGLVNADAATR

SEQ ID NO: 67456 - protein, 268 aa, Unidentified
QTVPWGITRVQAPAVHNRGITGSGVRVAILDSGISTHEDLNVRGGVSFVPGETTYADLNGHGTHVAGTVAALNNSIGVVGVAPSADLYAVKVLGANGSGSVSGIAQGLEWAAQNNMHIANMSLGAEGPSSTLERAVNYATSRDVLVIAATGNNGSGSVGYPARYANAMAVGATDQNNRRANFSQYGTGIDIVAPGVNVQSTYPGNRYVSMNGTSMATPHVAGAAALVKQRYPSWNATQIRDHLKNTATNLGNSSQFGSGLVNAEAATR

SEQ ID NO: 67457 - protein, 268 aa, Unidentified
QTVPWGITRVQAPAVHNRGITGSGVRVAILDSGISTHEDLNVRGGVSFVPGEPTYADLNGHGTHVAGTVAALNNSIGVVGVAPSADLYAVKVLGANGIGSVSGIAQGLEWAAQNNMHIANMSLGTEIPSSTLERAVNYATSRDVLVIAATGNNGSGSVGYPARYANAMAVGATDQNNRRANFSQYGTGIDIVAPGVNVQSTYPGNRYVSMNGTSMATPHVAGAAALVKQRYPSWNATQIRDHLKNTATNLGNSSQFGSGLVNAEAATR

SEQ ID NO: 67458 - protein, 268 aa, Unidentified
QTVPWGITRVQAPTVHNRGITGSGVKVAILDTGIAQHSDLTIRGGASFVPGESTTADLNGHGTHVAGTVAALNNSIGVIGHAPSADLYAVKVLGANGRGSVSGIAQGLEWAATNNMHIANMSLGSDAPSTTLERAVNYATSRGVLVIAATGNNGTGSIGYPARYANAMAVGATDQNNRRASFSQYGTGIDIVAPGVGIQSTYLNNSYASMPGTSMATPHVAGVAALVKQKNPSWNATQIRNHLKNTATNLGNSSQFGSGLVNADAATR

SEQ ID NO: 67459 - protein, 268 aa, Bacillus gibsonii
QTVPWGITRVQAPAVHNRGITGSGVRVAILDSGISTHEDLNVRGGVSFVPGETTYADLNGHGTHVAGTVAALNNSIGVVGVAPSADLYAVKVLGANGRGSVSGIAQGLEWAAQNNMHIANMSLGSEFPSSTLERAVNYATSRDVLVIAATGNNGSGSVGYPARYANAMAVGATDQNNRRANFSQYGTGIDIVAPGVNVQSTYPGNRYVSMNGTSMATPHVAGAAALVKQRYPSWNATQIRDHLKNTATNLGNSSQFGSGLVNAEAATR

SEQ ID NO: 67460 - protein, 268 aa, Unidentified
QTVPWGITRVQAPTVHNRGITGSGVKVAILDTGIAQHSDLTIRGGASFVPGESTTADLNGHGTHVAGTVAALNNSIGVIGVAPSADLYAVKVLGANGRGSVSGIAQGLEWAATNNMHIANMSLGSDAPSTTLERAVNYATSRGVLVIAATGNNGTGSIGYPARYANAMAVGATDQNNRRASFSQYGTGIDIVAPGVGIQSTYLNNSYASMPGTSMATPHVAGVAALVKQKNPSWNATQIRNHLKNTWTNLGNSSQFGSGLVNADAATR

SEQ ID NO: 67461 - protein, 268 aa, Unidentified
QTVPWGIERVQAPTVHNRGITGSGVKVAILDTGIAQHSDLTIRGGASFVPGESTTADLNGHGTHVAGTVAALDNSIGVIGVAPSADLYAVKVLGANGRGSVSGIAQGLEWAATNNMHIANMSLGSDAPSTTLERAVNYATSRGVLVIAATGNNGTGSIGYPARYANAMAVGATDQNNRRASFSQYGTGIDIVAPGVGIQSTYLNNSYASMPGTSMATPHVAGVAALVKQKNPSWNATQIRNHLKNTATNLGPSSQFGSGLVNADAATR

SEQ ID NO: 67462 - protein, 268 aa, Unidentified
QTVPWGITRVQAPTVHNRGITGSGVKVAILDTGIAQHSDLTIRGGASFVPGESTTADLNGHGTHVAGTVAALNNSIGVIGVAPSADLYAVKVLGANGRGSVSGIAQGLEWAATNNMHIANMSLGSDAPSTTLERAVNYATSRGVLVIAATGNNGTGSIGYPARYANAMAVGATDQNNRRASFSQYGTGIDIVAPGVGIQSTYLNNSYASMPGTSMATPHVAGVAALVKQKNPSWNATQIRNHLKNTPTNLGNSSQFGSGLVNADAATR

SEQ ID NO: 67463 - protein, 268 aa, Unidentified
QTVPWGITRVQAPAVHNRGITGSGVRVAILDSGISTHEDLNVRGGVSFVPGETTYADLNGHGTHVAGTVAALNNSIGVVGVAPSADLYAVKVLGAGGRGSVSGIAQGLEWAAQNNMHIANMSLGAEGPSSTLERAVNYATSRDVLVIAATGNNGSGSVGYPARYANAMAVGATDQNNRRANFSQYGTGIDIVAPGVNVQSTYPGNRYVSMNGTSMATPHVAGAAALVKQRYPSWNATQIRNHLKNTATNLGNSSQFGSGLVNAEAATR

SEQ ID NO: 67464 - protein, 268 aa, Unidentified
QTVPWGITRVQAPAVHNRGITGSGVRVAILDSGISTHEDLNVRGGVSFVPGEPTYADLNGHGTHVAGTVAALNNSIGVVGVAPSADLYAVKVLGANGTGSVSGIAQGLEWAAQNNMHIANMSLGGDFPSSTLERAVNYATSRDVLVIAATGNNGSGSVGYPARYANAMAVGATDQNNRRANFSQYGTGIDIVAPGVNVQSTYPGNRYVSMNGTSMATPHVAGAAALVKQRYPSWNATQIRDHLKNTATNLGNSSQFGSGLVNAEAATR

SEQ ID NO: 67465 - protein, 268 aa, Unidentified
QTVPWGITRVQAPTVHNRGITGSGVKVAILDTGIAQHSDLTIRGGASFVPGESTTADLNGHGTHVAGTVAALNNQIGVIGVAPSADLYAVKVLGANGRGSVSGIAQGLEWAATNNMHIANMSLGSDAPSTTLERAVNYATSRGVLVIAATGNNGTGSIGYPARYANAMAVGATDQNNRRASFSQYGTGIDIVAPGVGIQSTYLNNSYASMPGTSMATPHVAGVAALVKQKNPSWNATQIRNHLKNTATNLGNSSQFGSGLVNADAATR

SEQ ID NO: 67466 - protein, 268 aa, Unidentified
QTVPWGITRVQAPTVHNRGITGSGVKVAILDTGIAQHEDLTIRGGASFVPGESTTADLNGHGTHVAGTVAALDNSIGVIGVAPSADLYAVKVLGANGRGSVSGIAQGLEWAATNNMHIANMSLGSDAPSTTLERAVNYATSRGVLVIAATGNNGTGSIGYPARYANAMAVGATDQNNRRASFSQYGTGIDIVAPGVGIQSTYLNNSYASMSGTSMATPHVAGVAALVKQKNPSWNATQIRNHLKNTATNLGNSSQFGSGLVNADAATR

SEQ ID NO: 67467 - protein, 268 aa, Unidentified
QTVPWGITRVQAPTVHNRGITGSGVKVAILDTGIAQHSDLTIRGGASFVPGESTTADLNGHGTHVAGTVAALNNSIGVIGPAPSADLYAVKVLGANGRGSVSGIAQGLEWAATNNMHIANMSLGSDAPSTTLERAVNYATSRGVLVIAATGNNGTGSIGYPARYANAMAVGATDQNNRRASFSQYGTGIDIVAPGVGIQSTYLNNSYASMPGTSMATPHVAGVAALVKQKNPSWNATQIRNHLKNTATNLGNSSQFGSGLVNADAATR

SEQ ID NO: 67468 - protein, 268 aa, Unidentified
QTVPWGITRVQAPAVHNRGITGSGVRVAILDSGISTHEDLNVRGGVSFVPGETTYADLNGHGTHVAGTVAALNNSIGVVGVAPSADLYAVKVLGANGRGSVSGIAQGLEWAAQNNMHIANMSLGSGEPSSTLERAVNYATSRDVLVIAATGNNGSGSVGYPARYANAMAVGATDQNNRRANFSQYGTGIDIVAPGVNVQSTYPGNRYVSMNGTSMATPHVAGAAALVKQRYPSWNATQIRDHLKNTATNLGNSSQFGSGLVNAEAATR

SEQ ID NO: 67469 - protein, 268 aa, Unidentified
QTVPWGITRVQAPTVHNRGITGSGVKVAILDTGIAQHSMLTIRGGASFVPGESTTADLNGHGTHVAGTVAALNNSIGVIGVAPSADLYAVKVLGANGRGSVSGIAQGLEWAATNNMHIANMSLGSDAPSTTLERAVNYATSRGVLVIAATGNNGTGSIGYPARYANAMAVGATDQNNRRASFSQYGTGIDIVAPGVGIQSTYLNNSYASMPGTSMATPHVAGVAALVKQKNPSWNATQIRNHLKNTATNLGNSSQFGSGLVNADAATR

SEQ ID NO: 67470 - protein, 268 aa, Unidentified
QTVPWGITRVQAPAVHNRGITGSGVRVAILDSGISTHEDLNVRGGVSFVPGEPTYADLNGHGTHVAGTVAALNNSIGVVGVAPSADLYAVKVLGANGRGSVSGIAQGLEWAAQNNMHIANMSLGAEFPSSTLERAVNYATSRDVLVIAATGNNGSGSVGYPARYANAMAVGATDQNNRRANFSQYGTGIDIVAPGVNVQSTYPGNRYVSMNGTSMATPHVAGAAALVKQRYPSWNATQIRDHLKNTATNLGNSSQFGSGLVNAEAATR

SEQ ID NO: 67471 - protein, 268 aa, Unidentified
QTVPWGITRVQAPTVHNRGITGSGVKVAILDTGIAQHSDLTIRGGASFVPGESTTADLNGHGTHVAGTVAALNNSIGVIGVAPSADLYAVKVLGANGRGSVSGIAQGLEWAATNNMHIANMSLGSDAPNTTLERAVNYATSRGVLVIAATGNNGTGSIGYPARYANAMAVGATDQNNRRASFSQYGTGIDIVAPGVGIQSTYLNNSYASMPGTSMATPHVAGVAALVKQKNPSWNATQIRNHLKNTATNLGNSSQFGSGLVNADAATR

SEQ ID NO: 67472 - protein, 268 aa, Unidentified
QTVPWGITRVQAPTVHNRGITGSGVKVAILDTGIAQHSDLTIRGGAQFVPGESTTADLNGHGTHVAGTVAALNNSIGVIGVAPSADLYAVKVLGANGRGSVSGIAQGLEWAATNNMHIANMSLGSDAPSTTLERAVNYATSRGVLVIAATGNNGTGSIGYPARYANAMAVGATDQNNRRASFSQYGTGIDIVAPGVGIQSTYLNNSYASMPGTSMATPHVAGVAALVKQKNPSWNATQIRNHLKNTATNLGNSSQFGSGLVNADAATR

SEQ ID NO: 67473 - protein, 268 aa, Unidentified
QTVPWGITRVQAPTVHNRGITGSGVKVAILDTGIAQNSDLTIRGGASFVPGESTTADLNGHGTHVAGTVAALNNSIGVIGVAPSADLYAVKVLGANGRGSVSGIAQGLEWAATNNMHIANMSLGSDAPSTTLERAVNYATSRGVLVIAATGNNGTGSIGYPARYANAMAVGATDQNNRRASFSQYGTGIDIVAPGVGIQSTYLNNSYASMPGTSMATPHVAGVAALVKQKNPSWNATQIRNHLKNTATNLGNSSQFGSGLVNADAATR

SEQ ID NO: 67474 - protein, 268 aa, Unidentified
QTVPWGITRVQAPTVHNRGITGSGVKVAILDTGIAQHSDLTIRGGASFVPGESTTADLNGHGTHVSGTVAALNNSIGVIGVAPSADLYAVKVLGANGRGSVSGIAQGLEWAATNNMHIANMSLGSDAPSTTLERAVNYATSRGVLVIAATGNNGTGSIGYPARYANAMAVGATDQNNQRASFSQYGTGIDIVAPGVGIQSTYLNNSYASMSGTSMATPHVAGVAALVKQKNPSWNATQIRNHLKNTATNLGPSSQFGSGLVNADAATR

SEQ ID NO: 67475 - protein, 268 aa, Unidentified
QTVPWGITRVQAPTVHNRGITGSGVKVAILDTGIAQESDLTIRGGASFVPGESTTADLNGHGTHVAGTVAALNNSIGVIGVAPSADLYAVKVLGANGRGSVSGIAQGLEWAATNNMHIANMSLGSDAPSTTLERAVNYATSRGVLVIAATGNNGTGSIGYPARYANAMAVGATDQNNRRASFSQYGTGIDIVAPGVGIQSTYLNNSYASMPGTSMATPHVAGVAALVKQKNPSWNATQIRNHLKNTATNLGNSSQFGSGLVNADAATR

SEQ ID NO: 67476 - protein, 268 aa, Unidentified
QTVPWGITRVQAPAVHNRGITGSGVRVAILDSGISTHEDLNVRGGVSFVPGEPTYADLNGHGTHVAGTVAALNNSIGVVGVAPSADLYAVKVLGANGNGSVSGIAQGLEWAAQNNMHIANMSLGTQFPSSTLERAVNYATSRDVLVIAATGNNGSGSVGYPARYANAMAVGATDQNNRRANFSQYGTGIDIVAPGVNVQSTYPGNRYVSMNGTSMATPHVAGAAALVKQRYPSWNATQIRDHLKNTATNLGNSSQFGSGLVNAEAATR

SEQ ID NO: 67477 - protein, 268 aa, Unidentified
QTVPWGITRVQAPAVHNRGITGSGVRVAILDSGISTHEDLNVRGGVSFVPGEPTYADLNGHGTHVAGTVAALNNSIGVVGVAPSADLYAVKVLGANGQGSVSGIAQGLEWAAQNNMHIANMSLGTVDPSSTLERAVNYATSRDVLVIAATGNNGSGSVGYPARYANAMAVGATDQNNRRANFSQYGTGIDIVAPGVNVQSTYPGNRYVSMNGTSMATPHVAGAAALVKQRYPSWNATQIRDHLKNTATNLGNSSQFGSGLVNAEAATR

SEQ ID NO: 67478 - protein, 268 aa, Unidentified
QTVPWGITRVQAPAVHNRGITGSGVRVAILDSGISTHEDLNVRGGASFVPGETTYADLNGHGTHVAGTVAALNNSIGVVGVAPSADLYAVKVLGANGRGSVSGIAQGLEWAAQNNMHIANMSLGAEGPSSTLERAVNYATSRDVLVIAATGNNGSGSVGYPARYANAMAVGATDQNNRRANFSQYGTGIDIVAPGVNVQSTYPGNRYVSMNGTSMATPHVAGAAALVKQRYPSWNATQIRDHLKNTATNLGNSSQFGSGLVNAEAATR

SEQ ID NO: 67479 - protein, 268 aa, Unidentified
QTVPWGITRVQAPTVHNRGITGSGVKVAILDTGIAQSSDLTIRGGASFVPGESTTADLNGHGTHVAGTVAALNNSIGVIGVAPSADLYAVKVLGANGRGSVSGIAQGLEWAATNNMHIANMSLGSDAPSTTLERAVNYATSRGVLVIAATGNNGTGSIGYPARYANAMAVGATDQNNRRASFSQYGTGIDIVAPGVGIQSTYLNNSYASMPGTSMATPHVAGVAALVKQKNPSWNATQIRNHLKNTATNLGNSSQFGSGLVNADAATR

SEQ ID NO: 67480 - protein, 268 aa, Unidentified
QTVPWGITRVQAPAVHNRGITGSGVRVAILDSGISAHEDLNVRGGASFVPGEPTYADLNGHGTHVAGTVAALNNSIGVIGVAPNADLYAVKVLGANGRGSVSGIAQGLEWAATNNMHIANMSLGSDFPSSTLERAVNYATSRDVLVIAATGNNGSGSVGYPARYANAMAVGATDQNNRRANFSQYGTGIDIVAPGVNVQSTYPGNRYVSMNGTSMATPHVAGAAALVKQRYPSWNATQIRDHLKNTATNLGNSSQFGSGLVNAEAATR

SEQ ID NO: 67481 - protein, 268 aa, Unidentified
QTVPWGITRVQAPTVHNRGITGSGVKVAILDTGIAQHSWLTIRGGASFVPGESTTADLNGHGTHVAGTVAALNNSIGVIGVAPSADLYAVKVLGANGRGSVSGIAQGLEWAATNNMHIANMSLGSDAPSTTLERAVNYATSRGVLVIAATGNNGTGSIGYPARYANAMAVGATDQNNRRASFSQYGTGIDIVAPGVGIQSTYLNNSYASMPGTSMATPHVAGVAALVKQKNPSWNATQIRNHLKNTATNLGNSSQFGSGLVNADAATR

SEQ ID NO: 67482 - protein, 268 aa, Unidentified
QTVPWGITRVQAPTVHNRGITGSGVKVAILDTGIAQHEDLTIRGGASFVPGESTTADLNGHGTHVAGTVAALDNSIGVIGVAPSADLYAVKVLGANGRGSVSGIAQGLEWAATNNMHIANMSLGSDAPSTTLERAVNYATSRGVLVIAATGNNGTGSIGYPARYANAMAVGATDQNNRRASFSQYGTGIDIVAPGVGIQSTYLNNSYASMSGTSMATPHVAGVAALVKQKNPSWNATQIRNHLKNTATNLGPSSQFGSGLVNADAATR

SEQ ID NO: 67483 - protein, 268 aa, Unidentified
QTVPWGITRVQAPAVHNRGITGSGVRVAILDSGISTHEDLNVRGGVSFVPGEPTYADLNGHGTHVAGTVAALNNSIGVVGVAPSADLYAVKVLGANGRGSVSGIAQGLEWAATNNMHIANMSLGADGPSSTLERAVNYATSRDVLVIAATGNNGSGSVGYPARYANAMAVGATDQNNRRANFSQYGTGIDIVAPGVNVQSTYPGNRYVSMNGTSMATPHVAGAAALVKQRYPSWNATQIRDHLKNTATNLGNSSQFGSGLVNAEAATR

SEQ ID NO: 67484 - protein, 268 aa, Unidentified
QTVPWGITRVQAPAVHNRGITGSGVRVAILDSGISTHEDLNVRGGVSFVPGETTYADLNGHGTHVAGTVAALNNSIGVCGVAPSADLYAVKVLGANGRGSVSGIAQGLEWAAQNNMHIANMSLGAEGPSSTLERAVNYATSRDVLVIAATGNNGSGSVGYPARYANAMAVGATDQNNRRANFSQYGTGIDIVAPGVNVQSTYPGNRYVSMNGTSMATPHVAGAAALVKQRYPSWNATQIRNHLKNTATNLGNSSQFGSGLVNAEAATR

SEQ ID NO: 67485 - protein, 268 aa, Unidentified
QTVPWGITRVQAPTVHNRGITGSGVKVAILDTGIAQHSALTIRGGASFVPGESTTADLNGHGTHVAGTVAALNNSIGVIGVAPSADLYAVKVLGANGRGSVSGIAQGLEWAATNNMHIANMSLGSDAPSTTLERAVNYATSRGVLVIAATGNNGTGSIGYPARYANAMAVGATDQNNRRASFSQYGTGIDIVAPGVGIQSTYLNNSYASMPGTSMATPHVAGVAALVKQKNPSWNATQIRNHLKNTATNLGNSSQFGSGLVNADAATR

SEQ ID NO: 67486 - protein, 268 aa, Unidentified
QTVPWGITRVQAPTVHNRGITGSGVKVAILDTGIAQHSDLTIRGGASFVPGESTTAMLNGHGTHVAGTVAALNNSIGVIGVAPSADLYAVKVLGANGRGSVSGIAQGLEWAATNNMHIANMSLGSDAPSTTLERAVNYATSRGVLVIAATGNNGTGSIGYPARYANAMAVGATDQNNRRASFSQYGTGIDIVAPGVGIQSTYLNNSYASMPGTSMATPHVAGVAALVKQKNPSWNATQIRNHLKNTATNLGNSSQFGSGLVNADAATR

SEQ ID NO: 67487 - protein, 268 aa, Unidentified
QTVPWGITRVQAPTVHNRGITGSGVKVAILDTGIAQMSDLTIRGGASFVPGESTTADLNGHGTHVAGTVAALNNSIGVIGVAPSADLYAVKVLGANGRGSVSGIAQGLEWAATNNMHIANMSLGSDAPSTTLERAVNYATSRGVLVIAATGNNGTGSIGYPARYANAMAVGATDQNNRRASFSQYGTGIDIVAPGVGIQSTYLNNSYASMPGTSMATPHVAGVAALVKQKNPSWNATQIRNHLKNTATNLGNSSQFGSGLVNADAATR

SEQ ID NO: 67488 - protein, 268 aa, Unidentified
QTVPWGITRVQAPTVHNRGITGSGVKVAILDTGIAQHSDLTIRGGASFVPGESTTADLNGHGTHVAGTVAALNNSIGVIGEAPSADLYAVKVLGANGRGSVSGIAQGLEWAATNNMHIANMSLGSDAPSTTLERAVNYATSRGVLVIAATGNNGTGSIGYPARYANAMAVGATDQNNRRASFSQYGTGIDIVAPGVGIQSTYLNNSYASMPGTSMATPHVAGVAALVKQKNPSWNATQIRNHLKNTATNLGNSSQFGSGLVNADAATR

SEQ ID NO: 67489 - protein, 268 aa, Unidentified
QTVPWGITRVQAPTVHNRGITGSGVKVAILDTGIAQHSDLTIRGGANFVPGESTTADLNGHGTHVAGTVAALNNSIGVIGVAPSADLYAVKVLGANGRGSVSGIAQGLEWAATNNMHIANMSLGSDAPSTTLERAVNYATSRGVLVIAATGNNGTGSIGYPARYANAMAVGATDQNNRRASFSQYGTGIDIVAPGVGIQSTYLNNSYASMPGTSMATPHVAGVAALVKQKNPSWNATQIRNHLKNTATNLGNSSQFGSGLVNADAATR

SEQ ID NO: 67490 - protein, 268 aa, Unidentified
QTVPWGITRVQAPTVHNRGITGSGVKVAILDTGIAQHSDLTIRGGASFVPGESTTADLNGHGTHVAGTVAALNNYIGVIGVAPSADLYAVKVLGANGRGSVSGIAQGLEWAATNNMHIANMSLGSDAPSTTLERAVNYATSRGVLVIAATGNNGTGSIGYPARYANAMAVGATDQNNRRASFSQYGTGIDIVAPGVGIQSTYLNNSYASMPGTSMATPHVAGVAALVKQKNPSWNATQIRNHLKNTATNLGNSSQFGSGLVNADAATR

SEQ ID NO: 67491 - protein, 268 aa, Unidentified
QTVPWGITRVQAPAVHNRGITGSGVRVAILDSGISTHEDLNVRGGVSFVPGETTYADLNGHGTHVAGTVAALNNSIGVVGVAPSADLYAVKVLGANGRGSVSGIAQGLEWAAQNNMHIANMSLGGPCPSSTLERAVNYATSRDVLVIAATGNNGSGSVGYPARYANAMAVGATDQNNRRANFSQYGTGIDIVAPGVNVQSTYPGNRYVSMNGTSMATPHVAGAAALVKQRYPSWNATQIRDHLKNTATNLGNSSQFGSGLVNAEAATR

SEQ ID NO: 67492 - protein, 268 aa, Unidentified
QTVPWGITRVQAPTVHNRGITGSGVKVAILDTGIAQHSDLTIRGGASFVPGESTTADLNGHGTHVAGTVAALNNSIGVIGVAPSADLYAVKVLGANGRGSVSGIAQGLEWAATNNMHIANMSLGSDAPSTTLERAVNYATSRGVLVIAATGNNGTGSIGYPARYANAMAVGATDQNNRRASFSQYGTGIDIVAPGVGIQSTYLNNSYASMPGTSMATPHVAGVAALVKQKNPSWNATQIRNHLKNTMTNLGNSSQFGSGLVNADAATR

SEQ ID NO: 67493 - protein, 268 aa, Unidentified
QTVPWGITRVQAPTVHNRGITGSGVKVAILDTGIAQHSDLTIRGGASFVPGESTTADLNGHGTHVAGTVAALNNSIGVIGVAPSADLYAVKVLGANGRGSVSGIAQGLEWAATNNMHIANMSLGSDAPDTTLERAVNYATSRGVLVIAATGNNGTGSIGYPARYANAMAVGATDQNNRRASFSQYGTGIDIVAPGVGIQSTYLNNSYASMPGTSMATPHVAGVAALVKQKNPSWNATQIRNHLKNTATNLGNSSQFGSGLVNADAATR

SEQ ID NO: 67494 - protein, 268 aa, Unidentified
QTVPWGITRVQAPAVHNRGITGSGVRVAILDSGISTHEDLNVRGGVSFVPGEPTYADLNGHGTHVAGTVAALNNSIGVVGVAPSADLYAVKVLGANGRGSVSGIAQGLEWAATNNMHIANMSLGAEFPSSTLERAVNYATSRDVLVIAATGNNGSGSVGYPARYANAMAVGATDQNNRRANFSQYGTGIDIVAPGVNVQSTYPGNRYVSMNGTSMATPHVAGAAALVKQRYPSWNATQIRDHLKNTATNLGNSSQFGSGLVNAEAATR

SEQ ID NO: 67495 - protein, 268 aa, Unidentified
QTVPWGITRVQAPTVHNRGITGSGVKVAILDTGIAQHSDLTIRGGASFVPGESTTADLNGHGTHVAGTVAALDNSIGVIGVAPSADLYAVKVLGANGRGSVSGIAQGLEWAATNNMHIANMSLGSDAPSTTLERAVNYATSRGVLVIAATGNNGTGSIGYPARYANAMAVGATDQNNRRASFSQYGTGIDIVAPGVGIQSTYLNNSYASMSGTSMATPHVAGVAALVKQKNPSWNATQIRNHLKNTATNLGNSSQFGSGLVNADAATR

SEQ ID NO: 67496 - protein, 268 aa, Unidentified
QTVPWGITRVQAPTVHNRGITGSGVKVAILDTGIAQQSDLTIRGGASFVPGESTTADLNGHGTHVAGTVAALNNSIGVIGVAPSADLYAVKVLGANGRGSVSGIAQGLEWAATNNMHIANMSLGSDAPSTTLERAVNYATSRGVLVIAATGNNGTGSIGYPARYANAMAVGATDQNNRRASFSQYGTGIDIVAPGVGIQSTYLNNSYASMPGTSMATPHVAGVAALVKQKNPSWNATQIRNHLKNTATNLGNSSQFGSGLVNADAATR

SEQ ID NO: 67497 - protein, 274 aa, Unidentified
QTVPWGITRVQAPAVHNRGITGSGVRVAILDSGISXAHSDLNIRGGASFVPGEPTXTADLNGHGTHVAGTVAALNNSIGVXGVAPSADLYAVKVLGANGRGSXSGIAQGLEWAAXNNMHIANMSLGXDAPSSTLERAVNYATSXXVLVIAATGNNGSXXXXGSVGYPARYANAMAVGATDQNNRRANFSQYGTGIDIVAPGVNVQSTYPGNRYVSMNGTSMATPHVAGAAALVKQRYPSWNATQIRXHLKNTATNLGNSSQFGSGLVNAEAATR

SEQ ID NO: 67498 - protein, 268 aa, Unidentified
QTVPWGITRVQAPTVHNRGITGSGVKVAILDTGIAQHSDLTIRGGASFVPGESTTADLNGHGTHVAGTVAALNNSIGVIGVAPSADLYAVKVLGANGRGSVSGIAQGLEWAATNNMHIANMSLGSDAPSTTLERAVNYATSRGVLVIAATGNNGTGSIGYPARYANAMAVGATDQNNRRASFSQYGTGIDIVAPGVGIQSTYLNNSYASMPGTSMATPHVAGVAALVKQKNPSWNATQIRNHLKNTCTNLGNSSQFGSGLVNADAATR

SEQ ID NO: 67499 - protein, 268 aa, Unidentified
QTVPWGITRVQAPAVHNRGITGSGVRVAILDSGISTHEDLNIRGGVSFVPGETTYADLNGHGTHVAGTVAALNNSIGVVGVAPSADLYAVKVLGANGRGSVSGIAQGLEWAAQNNMHIANMSLGAEGPSSTLERAVNYATSRDVLVIAATGNNGSGSVGYPARYANAMAVGATDQNNRRANFSQYGTGIDIVAPGVNVQSTYPGNRYVSMNGTSMATPHVAGAAALVKQRYPSWNATQIRDHLKNTATNLGNSSQFGSGLVNAEAATR

SEQ ID NO: 67500 - protein, 268 aa, Unidentified
QTVPWGITRVQAPTVHNRGITGSGVKVAILDTGIAQHSDLTIRGGASFVPGESTTADLNGHGTHVAGTVAALNNSIGVIGVAPSADLNAVKVLGANGRGSVSGIAQGLEWAATNNMHIANMSLGSDAPSTTLERAVNYATSRGVLVIAATGNNGTGSIGYPARYANAMAVGATDQNNRRASFSQYGTGIDIVAPGVGIQSTYLNNSYASMPGTSMATPHVAGVAALVKQKNPSWNATQIRNHLKNTATNLGNSSQFGSGLVNADAATR

SEQ ID NO: 67501 - protein, 268 aa, Unidentified
QTVPWGITRVQAPTVHNRGITGSGVKVAILDTGIAQHSDLTIRGGASFVPGESTTADLNGHGTHVAGTVAALNNSIGVIGVAPSADLYAVKVLGANGRGSVSGIAQGLEWAATNNMHIANMSLGSDAHSTTLERAVNYATSRGVLVIAATGNNGTGSIGYPARYANAMAVGATDQNNRRASFSQYGTGIDIVAPGVGIQSTYLNNSYASMPGTSMATPHVAGVAALVKQKNPSWNATQIRNHLKNTATNLGNSSQFGSGLVNADAATR

SEQ ID NO: 67502 - protein, 268 aa, Unidentified
QTVPWGITRVQAPTVHNRGITGSGVKVAILDTGIAQHEDLTIRGGASFVPGESTTADLNGHGTHVAGTVAALDNSIGVIGVAPSADLYAVKVLGANGRGSVSGIAQGLEWAATNNMHIANMSLGSDAPSTTLERAVNYATSRGVLVIAATGNNGTGSIQYPARYANAMAVGATDQNNRRASFSQYGTGIDIVAPGVGIQSTYLNNSYASMSGTSMATPHVAGVAALVKQKNPSWNATQIRNHLKNTATNLGNSSQFGSGLVNADAATR

SEQ ID NO: 67503 - protein, 268 aa, Unidentified
QTVPWGITRVQAPAVHNRGITGSGVRVAILDSGISTHEDLNVRGGVSFVPGETTYADLNGHGTHVAGTVAALNNSIGVVGVAPSADLYAVKVLGANGRGSVSGIAQGLEWAAGNNMHIANMSLGAEGPSSTLERAVNYATSRDVLVIAATGNNGSGSVGYPARYANAMAVGATDQNNRRANFSQYGTGIDIVAPGVNVQSTYPGNRYVSMNGTSMATPHVAGAAALVKQRYPSWNATQIRNHLKNTATNLGNSSQFGSGLVNAEAATR

SEQ ID NO: 67504 - protein, 268 aa, Unidentified
QTVPWGITRVQAPTVHNRGITGSGVKVAILDTGIAQHSDLTIRGGASFVPGESTTADLNGHGTHVAGTVAALNNSIGVIGVAPSADLYAVKVLGANGRGSVSGIAQGLEWAATNNMHIANMSLGSDAQSTTLERAVNYATSRGVLVIAATGNNGTGSIGYPARYANAMAVGATDQNNRRASFSQYGTGIDIVAPGVGIQSTYLNNSYASMPGTSMATPHVAGVAALVKQKNPSWNATQIRNHLKNTATNLGNSSQFGSGLVNADAATR

SEQ ID NO: 67505 - protein, 268 aa, Unidentified
QVVPWGITRVQAPTVHNRGITGSGVKVAILDTGIAQHSDLTIRGGASFVPGESTTADLNGHGTHVAGTVAALNNNIGVIGVAPSADLYAVKVLGANGRGSVSGIAQGLEWAATNNMHIANMSLGSDAPSTTLERAVNYATSRGVLVIAATGNNGTGSIGYPARYANAMAVGATDQNNRRASFSQYGTGIDIVAPGVGIQSTYLNNSYASMPGTSMATPHVAGVAALVKQKNPSWNATQIRNHLKNTATNLGNSSQFGSGLVNADAATR

SEQ ID NO: 67506 - protein, 268 aa, Unidentified
QTVPWGITRVQAPAVHNRGITGSGVRVAILDSGISTHEDLNVRGGVSFVPGETTYADLNGHGTHVAGTVAALNNSIGVVGVAPSADLYAVKVLGANGRGSVSGIAQGLEWAAQNNMHIANMSLGAEAPSSTLERAVNYATSRDVLVIAATGNNGSGSVGYPARYANAMAVGATDQNNRRANFSQYGTGIDIVAPGVNVQSTYPGNRYVSMNGTSMATPHVAGAAALVKQRYPSWNATQIRNHLKNTATNLGNSSQFGSGLVNAEAATR

SEQ ID NO: 67507 - protein, 268 aa, Unidentified
QTVPWGITRVQAPTVHNRGITGSGVKVAILDTGIAQHSDLTIRGGASFVPGESTTADLNGHGTHVAGTVAALNNHIGVIGVAPSADLYAVKVLGANGRGSVSGIAQGLEWAATNNMHIANMSLGSDAPSTTLERAVNYATSRGVLVIAATGNNGTGSIGYPARYANAMAVGATDQNNRRASFSQYGTGIDIVAPGVGIQSTYLNNSYASMPGTSMATPHVAGVAALVKQKNPSWNATQIRNHLKNTATNLGNSSQFGSGLVNADAATR

SEQ ID NO: 67508 - protein, 268 aa, Unidentified
QTVPWGITRVQAPTVHNRGITGSGVKVAILDTGIAQHSDLTIRGGASFVPGESTTADLNGHGTHVAGTVAALNNSIGVIGQAPSADLYAVKVLGANGRGSVSGIAQGLEWAATNNMHIANMSLGSDAPSTTLERAVNYATSRGVLVIAATGNNGTGSIGYPARYANAMAVGATDQNNRRASFSQYGTGIDIVAPGVGIQSTYLNNSYASMPGTSMATPHVAGVAALVKQKNPSWNATQIRNHLKNTATNLGNSSQFGSGLVNADAATR

SEQ ID NO: 67509 - protein, 268 aa, Unidentified
QTVPWGIERVQAPTVHNRGITGSGVKVAILDTGIAQHSDLTIRGGASFVPGESTTADLNGHGTHVAGTVAALNNNIGVIGVAPSADLYAVKVLGANGRGSVSGIAQGLEWAATNNMHIANMSLGSDAPSTTLERAVNYATSRGVLVIAATGNNGTGSIGYPARYANAMAVGATDQNNQRASFSQYGTGIDIVAPGVGIQSTYLNNSYASMPGTSMATPHVAGVAALVKQKNPSWNATQIRNHLKNTATNLGNSSQFGSGLVNADAATR

SEQ ID NO: 67510 - protein, 268 aa, Unidentified
QTVPWGITRVQAPTVHNRGITGSGVKVAILDTGIAQHSDLTIRGGASFVPGESTTADLNGHGTHVAGTVAALNNSIGVIGCAPSADLYAVKVLGANGRGSVSGIAQGLEWAATNNMHIANMSLGSDAPSTTLERAVNYATSRGVLVIAATGNNGTGSIGYPARYANAMAVGATDQNNRRASFSQYGTGIDIVAPGVGIQSTYLNNSYASMPGTSMATPHVAGVAALVKQKNPSWNATQIRNHLKNTATNLGNSSQFGSGLVNADAATR

SEQ ID NO: 67511 - protein, 268 aa, Unidentified
QTVPWGIERVQAPTVHNRGITGSGVKVAILDTGIAQHSDLTIRGGASFVPGESTTADLNGHGTHVAGTVAALNNNIGVIGVAPSADLYAVKVLGANGRGSVSGIAQGLEWAATNNMHIANMSLGSDAPSTTLERAVNYATSRGVLVIAATGNNGTGSIGYPARYANAMAVGATDQNNRRASFSQYGTGIDIVAPGVGIQSTYLNNSYASMPGTSMATPHVAGVAALVKQKNPSWNATQIRNHLKNTATNLGPSSQFGSGLVNADAATR

SEQ ID NO: 67512 - protein, 268 aa, Unidentified
QTVPWGITRVQAPTVHNRGITGSGVKVAILDTGIAQHSDLTIRGGASFVPGESTTADLNGHGTHVAGTVAALNNSIGVIGVAPSADLYAVKVLGANGRGSVSGIAQGLEWAATNNMHIANMSLGSDAKSTTLERAVNYATSRGVLVIAATGNNGTGSIGYPARYANAMAVGATDQNNRRASFSQYGTGIDIVAPGVGIQSTYLNNSYASMPGTSMATPHVAGVAALVKQKNPSWNATQIRNHLKNTATNLGNSSQFGSGLVNADAATR

SEQ ID NO: 67513 - protein, 268 aa, Unidentified
QTVPWGITRVQAPTVHNRGITGSGVKVAILDTGIAQHSDLTIRGGASFVPGESTTADLNGHGTHVAGTVAALNNSIGVIGVAPSADLYAVKVLGANGRGSVSGIAQGLEWAATNNMHIANMSLGSDAPETTLERAVNYATSRGVLVIAATGNNGTGSIGYPARYANAMAVGATDQNNRRASFSQYGTGIDIVAPGVGIQSTYLNNSYASMPGTSMATPHVAGVAALVKQKNPSWNATQIRNHLKNTATNLGNSSQFGSGLVNADAATR

SEQ ID NO: 67514 - protein, 268 aa, Unidentified
QTVPWGITRVQAPTVHNRGITGSGVKVAILDTGIAQHSDLTIRGGASFVPGESTTADLNGHGTHVAGTVAALNNSIGVIGVAPSADLYAVKVLGANGRGSVSGIAQGLEWAATNNMHIANMSLGSDAPKTTLERAVNYATSRGVLVIAATGNNGTGSIGYPARYANAMAVGATDQNNRRASFSQYGTGIDIVAPGVGIQSTYLNNSYASMPGTSMATPHVAGVAALVKQKNPSWNATQIRNHLKNTATNLGNSSQFGSGLVNADAATR

SEQ ID NO: 67515 - protein, 268 aa, Unidentified
ETVPWGIERVQAPAVHNRGITGSGVRVAILDSGISAHEDLNIRGGASFVPGEPTTADLNGHGTHVAGTVAALDNNIGVIGVAPNAELYAVKVLGANGSGSVSGIAQGLEWAATNNMHIANMSLGSDFPSSTLERAVNYATSRDVLVIAATGNNGSGSVGYPARYANAMAVGATDQNNRRANFSQYGEGIDIVAPGVNVQSTYPGNRYVSMSGTSMATPHVAGAAALVKQRYPSWNATQIRDHLKNTATNLGNSSQFGSGLVNAEAATR

SEQ ID NO: 67516 - protein, 268 aa, Unidentified
QTVPWGITRVQAPTVHNRGITGSGVKVAILDTGIAQHSELTIRGGASFVPGESTTADLNGHGTHVAGTVAALNNSIGVIGVAPSADLYAVKVLGANGRGSVSGIAQGLEWAATNNMHIANMSLGSDAPSTTLERAVNYATSRGVLVIAATGNNGTGSIGYPARYANAMAVGATDQNNRRASFSQYGTGIDIVAPGVGIQSTYLNNSYASMPGTSMATPHVAGVAALVKQKNPSWNATQIRNHLKNTATNLGNSSQFGSGLVNADAATR

SEQ ID NO: 67517 - protein, 268 aa, Unidentified
QTVPWGITRVQAPTVHNRGITGSGVKVAILDTGIAQHSDLTIRGGASFVPGESTTADLNGHGTHVAGTVAALNNSIGVIGVAPSADLYAVKVLGANGRGSVSGIAQGLEWAATNNMHIANMSLGSDAPSTTLERAVNYATSRGVLVIAATGNNGTGSIGYPARYANAMAVGATDQNNRRASFSQYGTGIDIVAPGVGIQSTYLNNSYASMPGTSMATPHVSGVAALVKQKNPSWNATQIRNHLKNTATNLGNSSQFGSGLVNADAATR

SEQ ID NO: 67518 - protein, 268 aa, Unidentified
QTVPWGITRVQAPTVHNRGITGSGVKVAILDTGIAQHEDLTIRGGASFVPGESTTADLNGHGTHVSGTVAALNNSIGVIGVAPSADLYAVKVLGANGRGSVSGIAQGLEWAATNNMHIANMSLGSDAPSTTLERAVNYATSRGVLVIAATGNNGTGSIGYPARYANAMAVGATDQNNRRASFSQYGTGIDIVAPGVGIQSTYLNNSYASMPGTSMATPHVAGVAALVKQKNPSWNATQIRNHLKNTATNLGPSSQFGSGLVNADAATR

SEQ ID NO: 67519 - protein, 268 aa, Unidentified
QTVPWGITRVQAPTVHNRGITGSGVKVAILDTGIAQHSDLTIRGGASFVPGESTTADLNGHGTHVAGTVAALNNSIGVIGVAPSADLYAVKVLGANGRGSVSGIAQGLEWAATNNMHIANMSLGSDASSTTLERAVNYATSRGVLVIAATGNNGTGSIGYPARYANAMAVGATDQNNRRASFSQYGTGIDIVAPGVGIQSTYLNNSYASMPGTSMATPHVAGVAALVKQKNPSWNATQIRNHLKNTATNLGNSSQFGSGLVNADAATR

SEQ ID NO: 67520 - protein, 268 aa, Unidentified
QTVPWGITRVQAPAVHNRGITGSGVRVAILDSGISTHEDLNVRGGVSFVPGEPTTADLNGHGTHVAGTVAALDNSIGVVGVAPSADLYAVKVLGANGRGSVSGIAQGLEWAAANNMHIANMSLGSDAPSSTLERAVNYATSRDVLVIAATGNNGSGSVGYPARYANAMAVGATDQNNRRANFSQYGTGIDIVAPGVNVQSTYPGNRYVSMSGTSMATPHVAGAAALVKQRYPSWNATQIRQHLKNTATNLGNSSQFGSGLVNAEAATR

SEQ ID NO: 67521 - protein, 268 aa, Unidentified
QTVPWGITRVQAPAVHNRGITGSGVRVAILDSGISTHEDLNVRGGVSFVPGEPTYADLNGHGTHVAGTVAALNNSIGVVGVAPSADLYAVKVLGANGKGSVSGIAQGLEWAAQNNMHIANMSLGGGGPSSTLERAVNYATSRDVLVIAATGNNGSGSVGYPARYANAMAVGATDQNNRRANFSQYGTGIDIVAPGVNVQSTYPGNRYVSMNGTSMATPHVAGAAALVKQRYPSWNATQIRDHLKNTATNLGNSSQFGSGLVNAEAATR

SEQ ID NO: 67522 - protein, 268 aa, Unidentified
QTVPWGITRVQAPAVHNRGITGSGVRVAILDSGISTHEDLNVRGGVSFVPGETTTADLNGHGTHVAGTVAALNNSIGVVGVAPSADLYAVKVLGANGRGSVSGIAQGLEWAAQNNMHIANMSLGAEGPSSTLERAVNYATSRDVLVIAATGNNGSGSVGYPARYANAMAVGATDQNNRRANFSQYGTGIDIVAPGVNVQSTYPGNRYVSMNGTSMATPHVAGAAALVKQRYPSWNATQIRDHLKNTATNLGNSSQFGSGLVNAEAATR

SEQ ID NO: 67523 - protein, 268 aa, Unidentified
QTVPWGITRVQAPTVHNRGITGSGVKVAILDTGIAQHSDLTIRGGASFVPGESTTADLNGHGTHVAGTVAALNNSIGVIGVAPSADLYAVKVLGANGRGSVSGIAQGLEWAATNNMHIANMSLGSDACSTTLERAVNYATSRGVLVIAATGNNGTGSIGYPARYANAMAVGATDQNNRRASFSQYGTGIDIVAPGVGIQSTYLNNSYASMPGTSMATPHVAGVAALVKQKNPSWNATQIRNHLKNTATNLGNSSQFGSGLVNADAATR

SEQ ID NO: 67524 - protein, 268 aa, Unidentified
QTVPWGITRVQAPTVHNRGITGSGVKVAILDTGIAQHSDLTIRGGASFVPGESTTADLNGHGTHVAGTVAALNNSIGVIGVAPSADLYAVKVLGANGRGSVSGIAQGLEWAATNNMHIANMSLGSDAPMTTLERAVNYATSRGVLVIAATGNNGTGSIGYPARYANAMAVGATDQNNRRASFSQYGTGIDIVAPGVGIQSTYLNNSYASMPGTSMATPHVAGVAALVKQKNPSWNATQIRNHLKNTATNLGNSSQFGSGLVNADAATR

SEQ ID NO: 67525 - protein, 268 aa, Unidentified
QTVPWGIERVQAPTVHNRGITGSGVKVAILDTGIAQHSDLTIRGGASFVPGESTTADLNGHGTHVAGTVAALDNSIGVIGVAPSADLYAVKVLGANGRGSVSGIAQGLEWAATNNMHIANMSLGSDAPSTTLERAVNYATSRGVLVIAATGNNGTGSIGYPARYANAMAVGATDQNNRRASFSQYGTGIDIVAPGVGIQSTYLNNSYASMPGTSMATPHVAGVAALVKQKNPSWNATQIRNHLKNTATNLGNSSQFGSGLVNADAATR

SEQ ID NO: 67526 - protein, 268 aa, Unidentified
QTVPWGITRVQAPTVHNRGITGSGVKVAILDTGIAQHSDLTIRGGASFVPGESTTADLNGHGTHVAGTVAALNNSIGVIGKAPSADLYAVKVLGANGRGSVSGIAQGLEWAATNNMHIANMSLGSDAPSTTLERAVNYATSRGVLVIAATGNNGTGSIGYPARYANAMAVGATDQNNRRASFSQYGTGIDIVAPGVGIQSTYLNNSYASMPGTSMATPHVAGVAALVKQKNPSWNATQIRNHLKNTATNLGNSSQFGSGLVNADAATR

SEQ ID NO: 67527 - protein, 268 aa, Unidentified
QTVPWGITRVQAPTVHNRGITGSGVKVAILDTGIAQHSDLTIRGGASFVPGESTTADLNGHGTHVAGTVAALNNSIGVIGVAPSADLYAVKVLGANGRGIVSGIAQGLEWAATNNMHIANMSLGSDAPSTTLERAVNYATSRGVLVIAATGNNGTGSIGYPARYANAMAVGATDQNNRRASFSQYGTGIDIVAPGVGIQSTYLNNSYASMPGTSMATPHVAGVAALVKQKNPSWNATQIRNHLKNTATNLGNSSQFGSGLVNADAATR

SEQ ID NO: 67528 - protein, 268 aa, Unidentified
QTVPWGITRVQAPTVHNRGITGSGVKVAILDTGIAQHSDLTIRGGASFVPGESTTARLNGHGTHVAGTVAALNNSIGVIGVAPSADLYAVKVLGANGRGSVSGIAQGLEWAATNNMHIANMSLGSDAPSTTLERAVNYATSRGVLVIAATGNNGTGSIGYPARYANAMAVGATDQNNRRASFSQYGTGIDIVAPGVGIQSTYLNNSYASMPGTSMATPHVAGVAALVKQKNPSWNATQIRNHLKNTATNLGNSSQFGSGLVNADAATR

SEQ ID NO: 67529 - protein, 268 aa, Unidentified
QTVPWGITRVQAPAVHNRGITGSGVRVAILDSGISAHEDLNIRGGVSFVPGEPTTADLNGHGTHVAGTVAALNNSIGVIGVAPNADLYAVKVLGANGRGSVSGIAQGLEWAAQNNMHIANMSLGTDAPSSTLERAVNYATSRDVLVIAATGNNGSGSVGYPARYANAMAVGATDQNNRRANFSQYGTGIDIVAPGVNVQSTYPGNRYVSMNGTSMATPHVAGAAALVKQRYPSWNATQIRDHLKNTATNLGNSSQFGSGLVNAEAATR

SEQ ID NO: 67530 - protein, 268 aa, Unidentified
QTVPWGITRVQAPTVHNRGITGSGVKVAILDTGIAQHSDLTIRGGASFVPGESTTADLNGHGTHVAGTVAALNNSIGVIGVAPSADLYAVKVLGANGRGGVSGIAQGLEWAATNNMHIANMSLGSDAPSTTLERAVNYATSRGVLVIAATGNNGTGSIGYPARYANAMAVGATDQNNRRASFSQYGTGIDIVAPGVGIQSTYLNNSYASMPGTSMATPHVAGVAALVKQKNPSWNATQIRNHLKNTATNLGNSSQFGSGLVNADAATR

SEQ ID NO: 67531 - protein, 268 aa, Unidentified
QTVPWGITRVQAPAVHNRGITGSGVRVAILDSGISTHEDLNVRGGVSFVPGETTYADLNGHGTHVAGTVAALNNSIGVIGVAPNAELYAVKVLGANGRGSVSGIAQGLEWAAQNNMHIANMSLGAEGPSSTLERAVNYATSRDVLVIAATGNNGSGSVGYPARYANAMAVGATDQNNRRANFSQYGTGIDIVAPGVNVQSTYPGNRYVSMNGTSMATPHVAGAAALVKQRYPSWNATQIRNHLKNTATNLGNSSQFGSGLVNAEAATR

SEQ ID NO: 67532 - protein, 268 aa, Unidentified
QTVPWGITRVQAPAVHNRGITGSGVKVAILDSGISTHEDLNIRGGVSFVPGEPGYADLNGHGTHVAGTVAALDNSIGVIGVAPNAELYAVKVLGANGRGSISGIAQGLEWAATNNMHIANMSLGTDAPSSTLERAVNYATSRDVLVIAATGNNGSGSVGYPARYANAMAVGATDQNNRRANFSQYGTGIDIVAPGVNVQSTYPGNRYVSMNGTSMATPHVAGAAALVKQRYPSWNATQIRDHLKNTATNLGNSSQFGSGLVNAEAATR

SEQ ID NO: 67533 - protein, 268 aa, Unidentified
QTVPWGITRVQAPTVHNRGITGSGVKVAILDTGIAQHSDLTIRGGASFVPGESTTADLNGHGTHVAGTVAALNNSIGVIGVAPSADLYAVKVLGANGRGSVSGIAQGLEWAATNNMHIANMSLGSDAPVTTLERAVNYATSRGVLVIAATGNNGTGSIGYPARYANAMAVGATDQNNRRASFSQYGTGIDIVAPGVGIQSTYLNNSYASMPGTSMATPHVAGVAALVKQKNPSWNATQIRNHLKNTATNLGNSSQFGSGLVNADAATR

SEQ ID NO: 67534 - protein, 268 aa, Unidentified
QTVPWGIERVQAPTVHNRGITGSGVKVAILDTGIAQHEDLTIRGGASFVPGESTTADLNGHGTHVSGTVAALNNSIGVIGVAPSADLYAVKVLGANGRGSVSGIAQGLEWAATNNMHIANMSLGSDAPSTTLERAVNYATSRGVLVIAATGNNGTGSIGYPARYANAMAVGATDQNNRRASFSQYGTGIDIVAPGVGIQSTYLNNSYASMSGTSMATPHVAGVAALVKQKNPSWNATQIRNHLKNTATNLGNSSQFGSGLVNADAATR

SEQ ID NO: 67535 - protein, 268 aa, Unidentified
QTVPWGITRVQAPAVHNRGITGSGVRVAILDSGISTHEDLNVRGGVSFVPGETTYADLNGHGTHVAGTVAALNNSIGVVGVAPSADLYAVKVLGANGRGSVSGIAQGLEWAADNNMHIANMSLGAEGPSSTLERAVNYATSRDVLVIAATGNNGSGSVGYPARYANAMAVGATDQNNRRANFSQYGTGIDIVAPGVNVQSTYPGNRYVSMNGTSMATPHVAGAAALVKQRYPSWNATQIRNHLKNTATNLGNSSQFGSGLVNAEAATR

SEQ ID NO: 67536 - protein, 268 aa, Unidentified
QTVPWGITRVQAPTVHNRGITGSGVKVAILDTGIAQHSDLTIRGGASFVPGESTTADLNGHGTHVAGTVAALNNSIGVIGVAPSADLYAVKVLGANGRGSVSGIAQGLEWAATNNMHIANMSLGSDARSTTLERAVNYATSRGVLVIAATGNNGTGSIGYPARYANAMAVGATDQNNRRASFSQYGTGIDIVAPGVGIQSTYLNNSYASMPGTSMATPHVAGVAALVKQKNPSWNATQIRNHLKNTATNLGNSSQFGSGLVNADAATR

SEQ ID NO: 67537 - protein, 268 aa, Unidentified
QTVPWGITRVQAPAVHNRGITGSGVRVAILDSGISTHEDLNVRGGVSFVPGEPTTADLNGHGTHVAGTVAALDNSIGVIGVAPSADLYAVKVLGANGRGSVSGIAQGLEWAAANNMHIANMSLGTDAPSSTLERAVNYATSRDVLVIAATGNNGSGSVGYPARYANAMAVGATDQNNRRANFSQYGTGIDIVAPGVNVQSTYPGNRYVSMSGTSMATPHVAGAAALVKQRYPSWNATQIRNHLKNTATNLGNSSQFGSGLVNAEAATR

SEQ ID NO: 67538 - protein, 268 aa, Unidentified
QTVPWGITRVQAPTVHNRGITGSGVKVAILDTGIAQHSGLTIRGGASFVPGESTTADLNGHGTHVAGTVAALNNSIGVIGVAPSADLYAVKVLGANGRGSVSGIAQGLEWAATNNMHIANMSLGSDAPSTTLERAVNYATSRGVLVIAATGNNGTGSIGYPARYANAMAVGATDQNNRRASFSQYGTGIDIVAPGVGIQSTYLNNSYASMPGTSMATPHVAGVAALVKQKNPSWNATQIRNHLKNTATNLGNSSQFGSGLVNADAATR

SEQ ID NO: 67539 - protein, 268 aa, Unidentified
QTVPWGITRVQAPTVHNRGITGSGVKVAILDTGIAQRSDLTIRGGASFVPGESTTADLNGHGTHVAGTVAALNNSIGVIGVAPSADLYAVKVLGANGRGSVSGIAQGLEWAATNNMHIANMSLGSDAPSTTLERAVNYATSRGVLVIAATGNNGTGSIGYPARYANAMAVGATDQNNRRASFSQYGTGIDIVAPGVGIQSTYLNNSYASMPGTSMATPHVAGVAALVKQKNPSWNATQIRNHLKNTATNLGNSSQFGSGLVNADAATR

SEQ ID NO: 67540 - protein, 268 aa, Unidentified
QTVPWGITRVQAPTVHNRGITGSGVKVAILDTGIAQHSDLTIRGGASFVPGESTTADLNGHGTHVAGTVAALNNSIGVIGVAPSADLYAVKVLGANGRGEVSGIAQGLEWAATNNMHIANMSLGSDAPSTTLERAVNYATSRGVLVIAATGNNGTGSIGYPARYANAMAVGATDQNNRRASFSQYGTGIDIVAPGVGIQSTYLNNSYASMPGTSMATPHVAGVAALVKQKNPSWNATQIRNHLKNTATNLGNSSQFGSGLVNADAATR

SEQ ID NO: 67541 - protein, 268 aa, Unidentified
QTVPWGITRVQAPTVHNRGITGSGVKVAILDTGIAQHSDLTIRGGASFVPGESTTAWLNGHGTHVAGTVAALNNSIGVIGVAPSADLYAVKVLGANGRGSVSGIAQGLEWAATNNMHIANMSLGSDAPSTTLERAVNYATSRGVLVIAATGNNGTGSIGYPARYANAMAVGATDQNNRRASFSQYGTGIDIVAPGVGIQSTYLNNSYASMPGTSMATPHVAGVAALVKQKNPSWNATQIRNHLKNTATNLGNSSQFGSGLVNADAATR

SEQ ID NO: 67542 - protein, 268 aa, Unidentified
QTVPWGITRVQAPAVHNRGITGSGVRVAILDSGISTHEDLNVRGGVSFVPGETTYADLNGHGTHVAGTVAALNNSIGVVGVAPSADLYAVKVLGANGRGSVSGIAQGLEWAAQNNMHIANMSLGAEDPSSTLERAVNYATSRDVLVIAATGNNGSGSVGYPARYANAMAVGATDQNNRRANFSQYGTGIDIVAPGVNVQSTYPGNRYVSMNGTSMATPHVAGAAALVKQRYPSWNATQIRNHLKNTATNLGNSSQFGSGLVNAEAATR

SEQ ID NO: 67543 - protein, 268 aa, Unidentified
QTVPWGITRVQAPTVHNRGITGSGVKVAILDTGIAQHSDLTIRGGASFVPGESTTADLNGHGTHVAGTVAALNNSIGVIGNAPSADLYAVKVLGANGRGSVSGIAQGLEWAATNNMHIANMSLGSDAPSTTLERAVNYATSRGVLVIAATGNNGTGSIGYPARYANAMAVGATDQNNRRASFSQYGTGIDIVAPGVGIQSTYLNNSYASMPGTSMATPHVAGVAALVKQKNPSWNATQIRNHLKNTATNLGNSSQFGSGLVNADAATR

SEQ ID NO: 67544 - protein, 268 aa, Unidentified
QTVPWGITRVQAPTVHNRGITGSGVKVAILDTGIAQHSDLTIRGGASFVPGESTTADLNGHGTHVAGTVAALNNSIGVIGVAPSADLAAVKVLGANGRGSVSGIAQGLEWAATNNMHIANMSLGSDAPSTTLERAVNYATSRGVLVIAATGNNGTGSIGYPARYANAMAVGATDQNNRRASFSQYGTGIDIVAPGVGIQSTYLNNSYASMPGTSMATPHVAGVAALVKQKNPSWNATQIRNHLKNTATNLGNSSQFGSGLVNADAATR

SEQ ID NO: 67545 - protein, 268 aa, Unidentified
QTVPWGITRVQAPTVHNRGITGSGVKVAILDTGIAQHSDLTIRGGASFVPGESTTANLNGHGTHVAGTVAALNNSIGVIGVAPSADLYAVKVLGANGRGSVSGIAQGLEWAATNNMHIANMSLGSDAPSTTLERAVNYATSRGVLVIAATGNNGTGSIGYPARYANAMAVGATDQNNRRASFSQYGTGIDIVAPGVGIQSTYLNNSYASMPGTSMATPHVAGVAALVKQKNPSWNATQIRNHLKNTATNLGNSSQFGSGLVNADAATR

SEQ ID NO: 67546 - protein, 268 aa, Unidentified
QTVPWGITRVQAPTVHNRGITGSGVKVAILDTGIAQHEDLTIRGGASFVPGESTTADLNGHGTHVAGTVAALDNSIGVIGVAPSADLYAVKVLGANGRGSVSGIAQGLEWAATNNMHIANMSLGSDAPSTTLERAVNYATSRGVLVIAATGNNGTGSIQYPARYANAMAVGATDQNNRRASFSQYGTGIDIVAPGVGIQSTYLNNSYASMPGTSMATPHVAGVAALVKQKNPSWNATQIRNHLKNTATNLGNSSQFGSGLVNADAATR

SEQ ID NO: 67547 - protein, 268 aa, Unidentified
QTVPWGITRVQAPTVHNRGITGSGVKVAILDTGIAQCSDLTIRGGASFVPGESTTADLNGHGTHVAGTVAALNNSIGVIGVAPSADLYAVKVLGANGRGSVSGIAQGLEWAATNNMHIANMSLGSDAPSTTLERAVNYATSRGVLVIAATGNNGTGSIGYPARYANAMAVGATDQNNRRASFSQYGTGIDIVAPGVGIQSTYLNNSYASMPGTSMATPHVAGVAALVKQKNPSWNATQIRNHLKNTATNLGNSSQFGSGLVNADAATR

SEQ ID NO: 67548 - protein, 268 aa, Unidentified
QTVPWGIERVQAPTVHNRGITGSGVKVAILDTGIAQHSDLTIRGGASFVPGESTTADLNGHGTHVAGTVAALDNSIGVIGVAPSADLYAVKVLGANGRGSVSGIAQGLEWAATNNMHIANMSLGSDAPSTTLERAVNYATSRGVLVIAATGNNGTGSIQYPARYANAMAVGATDQNNRRASFSQYGTGIDIVAPGVGIQSTYLNNSYASMSGTSMATPHVAGVAALVKQKNPSWNATQIRNHLKNTATNLGNSSQFGSGLVNADAATR

SEQ ID NO: 67549 - protein, 268 aa, Unidentified
QTVPWGITRVQAPTVHNRGITGSGVKVAILDTGIAQHSDLTIRGGASFVPGESTTADLNGHGTHVAGTVAALNNSIGVIGVAPSADLYAVKVLGANGRGSVSGIAQGLEWAATNNMHIANMSLGSDAPSTTLERAVNYATSRGVLVIAATGNNGTGSIGYPARYANAMAVGATDQNNRRASFSQYGTGIDIVAPGVGIQSTYLNNSYASMPGTSMATPHVAGVAALVKQKNPSWNATQIRNHLKNTSTNLGNSSQFGSGLVNADAATR

SEQ ID NO: 67550 - protein, 268 aa, Unidentified
QTVPWGITRVQAPAVHNRGITGSGVRVAILDSGISTHEDLNVRGGVSFVPGETTYADLNGHGTHVAGTVAALNNSIGVVGVAPSADLYAVKVLGANGRGSVSGIAQGLEWAAQNNMHIANMSLGAESPSSTLERAVNYATSRDVLVIAATGNNGSGSVGYPARYANAMAVGATDQNNRRANFSQYGTGIDIVAPGVNVQSTYPGNRYVSMNGTSMATPHVAGAAALVKQRYPSWNATQIRDHLKNTATNLGNSSQFGSGLVNAEAATR

SEQ ID NO: 67551 - protein, 268 aa, Unidentified
QTVPWGITRVQAPTVHNRGITGSGVKVAILDTGIAQHSDLTIRGGASFVPGESTTADLNGHGTHVAGTVAALNNNIGVIGVAPSADLYAVKVLGANGRGSVSGIAQGLEWAATNNMHIANMSLGSDAPSTTLERAVNYATSRGVLVIAATGNNGTGSIGYPARYANAMAVGATDQNNRRASFSQYGTGIDIVAPGVGIQSTYLNNSYASMPGTSMATPHVAGVAALVKQKNPSWNATQIRNHLKNTATNLGPSSQFGSGLVNADAATR

SEQ ID NO: 67552 - protein, 268 aa, Unidentified
QTVPWGITRVQAPTVHNRGITGSGVKVAILDTGIAQHSDLTIRGGASFVPGESTTADLNGHGTHVAGTVAALNNMIGVIGVAPSADLYAVKVLGANGRGSVSGIAQGLEWAATNNMHIANMSLGSDAPSTTLERAVNYATSRGVLVIAATGNNGTGSIGYPARYANAMAVGATDQNNRRASFSQYGTGIDIVAPGVGIQSTYLNNSYASMPGTSMATPHVAGVAALVKQKNPSWNATQIRNHLKNTATNLGNSSQFGSGLVNADAATR

SEQ ID NO: 67553 - protein, 268 aa, Unidentified
QTVPWGITRVQAPTVHNRGITGSGVKVAILDTGIAQHSLLTIRGGASFVPGESTTADLNGHGTHVAGTVAALNNSIGVIGVAPSADLYAVKVLGANGRGSVSGIAQGLEWAATNNMHIANMSLGSDAPSTTLERAVNYATSRGVLVIAATGNNGTGSIGYPARYANAMAVGATDQNNRRASFSQYGTGIDIVAPGVGIQSTYLNNSYASMPGTSMATPHVAGVAALVKQKNPSWNATQIRNHLKNTATNLGNSSQFGSGLVNADAATR

SEQ ID NO: 67554 - protein, 268 aa, Unidentified
QTVPWGITRVQAPTVHNRGITGSGVKVAILDTGIAQHSDLTIRGGASFVPGESTTADLNGHGTHVAGTVAALNNSIGVIGVAPSADLDAVKVLGANGRGSVSGIAQGLEWAATNNMHIANMSLGSDAPSTTLERAVNYATSRGVLVIAATGNNGTGSIGYPARYANAMAVGATDQNNRRASFSQYGTGIDIVAPGVGIQSTYLNNSYASMPGTSMATPHVAGVAALVKQKNPSWNATQIRNHLKNTATNLGNSSQFGSGLVNADAATR

SEQ ID NO: 67555 - protein, 268 aa, Unidentified
QTVPWGITRVQAPTVHNRGITGSGVKVAILDTGIAQHEDLTIRGGASFVPGESTTADLNGHGTHVAGTVAALNNNIGVIGVAPSADLYAVKVLGANGRGSVSGIAQGLEWAATNNMHIANMSLGSDAPSTTLERAVNYATSRGVLVIAATGNNGTGSIGYPARYANAMAVGATDQNNRRASFSQYGTGIDIVAPGVGIQSTYLNNSYASMSGTSMATPHVAGVAALVKQKNPSWNATQIRNHLKNTATNLGNSSQFGSGLVNADAATR

SEQ ID NO: 67556 - protein, 268 aa, Unidentified
QTVPWGITRVQAPAVHNRGITGSGVRVAILDSGISTHEDLNVRGGVSFVPGEPTYADLNGHGTHVAGTVAALNNSIGVVGVAPSADLYAVKVLGANGRGSVSGIAQGLEWAAQNNMHIANMSLGDSAPSSTLERAVNYATSRDVLVIAATGNNGSGSVGYPARYANAMAVGATDQNNRRANFSQYGTGIDIVAPGVNVQSTYPGNRYVSMNGTSMATPHVAGAAALVKQRYPSWNATQIRDHLKNTATNLGNSSQFGSGLVNAEAATR

SEQ ID NO: 67557 - protein, 268 aa, Unidentified
QTVPWGITRVQAPAVHNRGITGSGVRVAILDSGISTHEDLNVRGGVSFVPGETTYADLNGHGTHVAGTVAALNNSIGVVGVAPSADLYAVKVLGANGRGSVSGIAQGLEWAAQNRMHIANMSLGAEGPSSTLERAVNYATSRDVLVIAATGNNGSGSVGYPARYANAMAVGATDQNNRRANFSQYGTGIDIVAPGVNVQSTYPGNRYVSMNGTSMATPHVAGAAALVKQRYPSWNATQIRNHLKNTATNLGNSSQFGSGLVNAEAATR

SEQ ID NO: 67558 - protein, 268 aa, Unidentified
QTVPWGITRVQAPAVHNRGITGSGVRVAILDSGISTHEDLNVRGGVSFVPGETTYADLNGHGTHVAGTVAALNNSIGVVGVAPSADLYAVKVLGANGRGSVSGIAQGLEWAAQNNMHIANMSLGSNDPSSTLERAVNYATSRDVLVIAATGNNGSGSVGYPARYANAMAVGATDQNNRRANFSQYGTGIDIVAPGVNVQSTYPGNRYVSMNGTSMATPHVAGAAALVKQRYPSWNATQIRDHLKNTATNLGNSSQFGSGLVNAEAATR

SEQ ID NO: 67559 - protein, 268 aa, Unidentified
QTVPWGITRVQAPTVHNRGITGSGVKVAILDTGIAQHSDLTIRGGASFVPGESTTADLNGHGTHVAGTVAALNNSIGVIGVAPSADLYAVKVLGANGRGSVSGIAQGLEWAATNNMHIANMSLGSDAPWTTLERAVNYATSRGVLVIAATGNNGTGSIGYPARYANAMAVGATDQNNRRASFSQYGTGIDIVAPGVGIQSTYLNNSYASMPGTSMATPHVAGVAALVKQKNPSWNATQIRNHLKNTATNLGNSSQFGSGLVNADAATR

SEQ ID NO: 67560 - protein, 268 aa, Unidentified
QTVPWGITRVQAPTVHNRGITGSGVKVAILDTGIAQHSDLTIRGGASFVPGESTTADLNGHGTHVAGTVAALNNSIGVIGRAPSADLYAVKVLGANGRGSVSGIAQGLEWAATNNMHIANMSLGSDAPSTTLERAVNYATSRGVLVIAATGNNGTGSIGYPARYANAMAVGATDQNNRRASFSQYGTGIDIVAPGVGIQSTYLNNSYASMPGTSMATPHVAGVAALVKQKNPSWNATQIRNHLKNTATNLGNSSQFGSGLVNADAATR

SEQ ID NO: 67561 - protein, 268 aa, Unidentified
QTVPWGITRVQAPAVHNRGITGSGVRVAILDSGISAHSDLNIRGGASFVPGEPTTADLNGHGTHVAGTVAALDNSIGVVGVAPSADLYAVKVLGANGRGSISGIAQGLEWAAQNNMHIANMSLGTDAPSSTLERAVNYATSRDVLVIAATGNNGSGSVGYPARYANAMAVGATDQNNRRANFSQYGTGIDIVAPGVNVQSTYPGNRYVSMNGTSMATPHVAGAAALVKQRYPSWNATQIRDHLKNTATNLGNSSQFGSGLVNAEAATR

SEQ ID NO: 67562 - protein, 268 aa, Unidentified
QTVPWGITRVQAPAVHNRGITGSGVRVAILDSGISTHEDLNVRGGVSFVPGEPTYADLNGHGTHVAGTVAALNNSIGVVGVAPSADLYAVKVLGANGRGSVSGIAQGLEWAAQNNMHIANMSLGTDAPSSTLERAVNYATSRDVLVIAATGNNGSGSVGYPARYANAMAVGATDQNNRRANFSQYGTGIDIVAPGVNVQSTYPGNRYVSMNGTSMATPHVAGAAALVKQRYPSWNATQIRDHLKNTATNLGNSSQFGSGLVNAEAATR

SEQ ID NO: 67563 - protein, 268 aa, Unidentified
QTVPWGITRVQAPTVHNRGITGSGVKVAILDTGIAQHSDLTIRGGASFVPGESTTADLNGHGTHVAGTVAALNNSIGVIGVAPSADLYAVKVLGANGRGSVSGIAQGLEWAATNNMHIANMSLGSDAPLTTLERAVNYATSRGVLVIAATGNNGTGSIGYPARYANAMAVGATDQNNRRASFSQYGTGIDIVAPGVGIQSTYLNNSYASMPGTSMATPHVAGVAALVKQKNPSWNATQIRNHLKNTATNLGNSSQFGSGLVNADAATR

SEQ ID NO: 67564 - protein, 268 aa, Unidentified
QTVPWGITRVQAPTVHNRGITGSGVKVAILDTGIAQHSDLTIRGGACFVPGESTTADLNGHGTHVAGTVAALNNSIGVIGVAPSADLYAVKVLGANGRGSVSGIAQGLEWAATNNMHIANMSLGSDAPSTTLERAVNYATSRGVLVIAATGNNGTGSIGYPARYANAMAVGATDQNNRRASFSQYGTGIDIVAPGVGIQSTYLNNSYASMPGTSMATPHVAGVAALVKQKNPSWNATQIRNHLKNTATNLGNSSQFGSGLVNADAATR

SEQ ID NO: 67565 - protein, 268 aa, Unidentified
QVVPWGITRVQAPTVHNRGITGSGVKVAILDTGIAQHSDLTIRGGASFVPGESTTADLNGHGTHVAGTVAALDNSIGVIGVAPSADLYAVKVLGANGRGSVSGIAQGLEWAATNNMHIANMSLGSDAPSTTLERAVNYATSRGVLVIAATGNNGTGSIGYPARYANAMAVGATDQNNQRASFSQYGTGIDIVAPGVGIQSTYLNNSYASMPGTSMATPHVAGVAALVKQKNPSWNATQIRNHLKNTATNLGPSSQFGSGLVNADAATR

SEQ ID NO: 67566 - protein, 268 aa, Unidentified
QTVPWGITRVQAPTVHNRGITGSGVKVAILDTGIAQHSDLTIRGGASFVPGESTTAVLNGHGTHVAGTVAALNNSIGVIGVAPSADLYAVKVLGANGRGSVSGIAQGLEWAATNNMHIANMSLGSDAPSTTLERAVNYATSRGVLVIAATGNNGTGSIGYPARYANAMAVGATDQNNRRASFSQYGTGIDIVAPGVGIQSTYLNNSYASMPGTSMATPHVAGVAALVKQKNPSWNATQIRNHLKNTATNLGNSSQFGSGLVNADAATR

SEQ ID NO: 67567 - protein, 268 aa, Unidentified
QTVPWGITRVQAPAVHNRGITGSGVRVAILDSGISTHEDLNVRGGVSFVPGEPTYADLNGHGTHVAGTVAALNNSIGVVGVAPSADLYAVKVLGANGRGSVSGIAQGLEWAAQNNMHIANMSLGTEEPSSTLERAVNYATSRDVLVIAATGNNGSGSVGYPARYANAMAVGATDQNNRRANFSQYGTGIDIVAPGVNVQSTYPGNRYVSMNGTSMATPHVAGAAALVKQRYPSWNATQIRDHLKNTATNLGNSSQFGSGLVNAEAATR

SEQ ID NO: 67568 - protein, 268 aa, Unidentified
QTVPWGITRVQAPAVHNRGITGSGVRVAILDSGISTHEDLNVRGGVSFVPGEPGTADLNGHGTHVAGTVAALDNSIGVVGVAPSADLYAVKVLGANGRGSVSGIAQGLEWAAQNNMHIANMSLGTDAPSSTLERAVNYATSRDVLVIAATGNNGSGSVGYPARYANAMAVGATDQNNRRANFSQYGTGIDIVAPGVNVQSTYPGNRYVSMNGTSMATPHVAGAAALVKQRYPSWNATQIRDHLKNTATNLGNSSQFGSGLVNAEAATR

SEQ ID NO: 67569 - protein, 268 aa, Unidentified
QTVPWGITRVQAPTVHNRGITGSGVKVAILDTGIAQHEDLTIRGGASFVPGESTTADLNGHGTHVAGTVAALDNSIGVIGVAPSADLYAVKVLGANGRGSVSGIAQGLEWAATNNMHIANMSLGSDAPSTTLERAVNYATSRGVLVIAATGNNGTGSIGYPARYANAMAVGATDQNNRRASFSQYGTGIDIVAPGVGIQSTYLNNSYASMPGTSMATPHVAGVAALVKQKNPSWNATQIRNHLKNTATNLGNSSQFGSGLVNADAATR

SEQ ID NO: 67570 - protein, 268 aa, Unidentified
QTVPWGITRVQAPAVHNRGITGSGVRVAILDSGISTHEDLNVRGGVSFVPGETTYADLNGHGTHVAGTVAALNNSIGVVGVAPSADLYAVKVLGANGRGSVSGIAQGLEWAATNNMHIANMSLGAEGPSSTLERAVNYATSRDVLVIAATGNNGSGSVGYPARYANAMAVGATDQNNRRANFSQYGTGIDIVAPGVNVQSTYPGNRYVSMNGTSMATPHVAGAAALVKQRYPSWNATQIRNHLKNTATNLGNSSQFGSGLVNAEAATR

SEQ ID NO: 67571 - protein, 268 aa, Unidentified
QTVPWGITRVQAPTVHNRGITGSGVKVAILDTGIAQHSDLTIRGGASFVPGESTTADLNGHGTHVAGTVAALNNSIGVIGVAPSADLYAVKVLGANGRGDVSGIAQGLEWAATNNMHIANMSLGSDAPSTTLERAVNYATSRGVLVIAATGNNGTGSIGYPARYANAMAVGATDQNNRRASFSQYGTGIDIVAPGVGIQSTYLNNSYASMPGTSMATPHVAGVAALVKQKNPSWNATQIRNHLKNTATNLGNSSQFGSGLVNADAATR

SEQ ID NO: 67572 - protein, 268 aa, Unidentified
QTVPWGITRVQAPTVHNRGITGSGVKVAILDTGIAQPSDLTIRGGASFVPGESTTADLNGHGTHVAGTVAALNNSIGVIGVAPSADLYAVKVLGANGRGSVSGIAQGLEWAATNNMHIANMSLGSDAPSTTLERAVNYATSRGVLVIAATGNNGTGSIGYPARYANAMAVGATDQNNRRASFSQYGTGIDIVAPGVGIQSTYLNNSYASMPGTSMATPHVAGVAALVKQKNPSWNATQIRNHLKNTATNLGNSSQFGSGLVNADAATR

SEQ ID NO: 67573 - protein, 268 aa, Unidentified
QTVPWGITRVQAPTVHNRGITGSGVKVAILDTGIAQHSDLTIRGGASFVPGESTTACLNGHGTHVAGTVAALNNSIGVIGVAPSADLYAVKVLGANGRGSVSGIAQGLEWAATNNMHIANMSLGSDAPSTTLERAVNYATSRGVLVIAATGNNGTGSIGYPARYANAMAVGATDQNNRRASFSQYGTGIDIVAPGVGIQSTYLNNSYASMPGTSMATPHVAGVAALVKQKNPSWNATQIRNHLKNTATNLGNSSQFGSGLVNADAATR

SEQ ID NO: 67574 - protein, 268 aa, Unidentified
QTVPWGITRVQAPTVHNRGITGSGVKVAILDTGIAQHSDLTIRGGASFVPGESTTADLNGHGTHVAGTVAALNNSIGVIGVAPSADLYAVKVLGANGRGMVSGIAQGLEWAATNNMHIANMSLGSDAPSTTLERAVNYATSRGVLVIAATGNNGTGSIGYPARYANAMAVGATDQNNRRASFSQYGTGIDIVAPGVGIQSTYLNNSYASMPGTSMATPHVAGVAALVKQKNPSWNATQIRNHLKNTATNLGNSSQFGSGLVNADAATR

SEQ ID NO: 67575 - protein, 268 aa, Unidentified
QTVPWGITRVQAPTVHNRGITGSGVKVAILDTGIAQHSDLTIRGGASFVPGESTTAYLNGHGTHVAGTVAALNNSIGVIGVAPSADLYAVKVLGANGRGSVSGIAQGLEWAATNNMHIANMSLGSDAPSTTLERAVNYATSRGVLVIAATGNNGTGSIGYPARYANAMAVGATDQNNRRASFSQYGTGIDIVAPGVGIQSTYLNNSYASMPGTSMATPHVAGVAALVKQKNPSWNATQIRNHLKNTATNLGNSSQFGSGLVNADAATR

SEQ ID NO: 67576 - protein, 268 aa, Unidentified
QTVPWGITRVQAPTVHNRGITGSGVKVAILDTGIAQHSDLTIRGGASFVPGESTTADLNGHGTHVAGTVAALNNSIGVIGVAPSADLYAVKVLGANGRGSVSGIAQGLEWAATNNMHIANMSLGSDAFSTTLERAVNYATSRGVLVIAATGNNGTGSIGYPARYANAMAVGATDQNNRRASFSQYGTGIDIVAPGVGIQSTYLNNSYASMPGTSMATPHVAGVAALVKQKNPSWNATQIRNHLKNTATNLGNSSQFGSGLVNADAATR

SEQ ID NO: 67577 - protein, 268 aa, Unidentified
QTVPWGITRVQAPAVHNRGITGSGVRVAILDSGISTHEDLNVRGGVSFVPGETTYADLNGHGTHVAGTVAALNNSIGVVGVAPSADLYAVKVLGANGRGSVSGIAQGLEWAAQNNMHIANMSLGSGPPSSTLERAVNYATSRDVLVIAATGNNGSGSVGYPARYANAMAVGATDQNNRRANFSQYGTGIDIVAPGVNVQSTYPGNRYVSMNGTSMATPHVAGAAALVKQRYPSWNATQIRDHLKNTATNLGNSSQFGSGLVNAEAATR

SEQ ID NO: 67578 - protein, 268 aa, Unidentified
QTVPWGITRVQAPAVHNRGITGSGVRVAILDSGISTHEDLTIRGGVSFVPGEPTYADLNGHGTHVAGTVAALDNSIGVVGVAPSADLYAVKVLGANGRGSVSGIAQGLEWAAQNNMHIANMSLGTDAPSSTLERAVNYATSRDVLVIAATGNNGSGSVGYPARYANAMAVGATDQNNRRANFSQYGTGIDIVAPGVNVQSTYPGNRYVSMNGTSMATPHVAGAAALVKQRYPSWNATQIRNHLKNTATNLGNSSQFGSGLVNAEAATR

SEQ ID NO: 67579 - protein, 268 aa, Unidentified
QTVPWGITRVQAPTVHNRGITGSGVKVAILDTGIAQHSDLTIRGGASFVPGESTTADLNGHGTHVAGTVAALNNSIGVIGVAPSADLFAVKVLGANGRGSVSGIAQGLEWAATNNMHIANMSLGSDAPSTTLERAVNYATSRGVLVIAATGNNGTGSIGYPARYANAMAVGATDQNNRRASFSQYGTGIDIVAPGVGIQSTYLNNSYASMPGTSMATPHVAGVAALVKQKNPSWNATQIRNHLKNTATNLGNSSQFGSGLVNADAATR

SEQ ID NO: 67580 - protein, 268 aa, Unidentified
QTVPWGITRVQAPTVHNRGITGSGVKVAILDTGIAQHEDLTIRGGASFVPGESTTADLNGHGTHVAGTVAALDNSIGVIGVAPSADLYAVKVLGANGRGSVSGIAQGLEWAATNNMHIANMSLGSDAPSTTLERAVNYATSRGVLVIAATGNNGTGSIGYPARYANAMAVGATDQNNQRASFSQYGTGIDIVAPGVGIQSTYLNNSYASMPGTSMATPHVAGVAALVKQKNPSWNATQIRNHLKNTATNLGNSSQFGSGLVNADAATR

SEQ ID NO: 67581 - protein, 268 aa, Unidentified
QTVPWGITRVQAPTVHNRGITGSGVKVAILDTGIAQHSDLTIRGGASFVPGESTTADLNGHGTHVAGTVAALNNSIGVIGVAPSADLYAVKVLGANGRGSVSGIAQGLEWAATNNMHIANMSLGSDAPSTTLERAVNYATSRGVLVIAATGNNGTGSIGYPARYANAMAVGATDQNNRRASFSQYGTGIDIVAPGVGIQSTYLNNSYASMPGTSMATPHVAGVAALVKQKNPSWNATQIRNHLKNTRTNLGNSSQFGSGLVNADAATR

SEQ ID NO: 67582 - protein, 268 aa, Shouchella gibsonii
QTVPWGITRVQAPAVHNRGITGSGVRVAILDSGISAHEDLNIRGGASFVPGEPTTADLNGHGTHVAGTVAALDNSIGVIGVAPNAELYAVKVLGANGRGSVSGIAQGLEWAATNNMHIANMSLGAEGPSSTLERAVNYATSRDVLVIAATGNNGSGSVGYPARYANAMAVGATDQNNRRANFSQYGTGIDIVAPGVAVQSTYPGNRYVSQQGTSMATPHVAGAAALVKQRYPSWNATQIRNHLKNTATNLGNSSQFGSGLVNAEAATR

SEQ ID NO: 67583 - protein, 268 aa, Unidentified
QTVPWGITRVQAPAVHNRGITGSGVRVAILDSGISTHEDLNVRGGVSFVPGEPTTADLNGHGTHVAGTVAALDNSIGVVGVAPSADLYAVKVLGANGRGSVSGIAQGLEWAAANNMHIANMSLGTDAPSSTLERAVNYATSRDVLVIAATGNNGSGSVGYPARYANAMAVGATDQNNRRANFSQYGTGIDIVAPGVNVQSTYPGNRYVSMNGTSMATPHVAGAAALVKQRYPSWNATQIRDHLKNTATNLGNSSQFGSGLVNAEAATR

SEQ ID NO: 67584 - protein, 268 aa, Unidentified
QTVPWGITRVQAPTVHNRGITGSGVKVAILDTGIAQHSDLTIRGGASFVPGESTTADLNGHGTHVAGTVAALNNSIGVIGVAPSADLYAVKVLGANGRGAVSGIAQGLEWAATNNMHIANMSLGSDAPSTTLERAVNYATSRGVLVIAATGNNGTGSIGYPARYANAMAVGATDQNNRRASFSQYGTGIDIVAPGVGIQSTYLNNSYASMPGTSMATPHVAGVAALVKQKNPSWNATQIRNHLKNTATNLGNSSQFGSGLVNADAATR

SEQ ID NO: 67585 - protein, 268 aa, Unidentified
QTVPWGITRVQAPTVHNRGITGSGVKVAILDTGIAQHSDLTIRGGADFVPGESTTADLNGHGTHVAGTVAALNNSIGVIGVAPSADLYAVKVLGANGRGSVSGIAQGLEWAATNNMHIANMSLGSDAPSTTLERAVNYATSRGVLVIAATGNNGTGSIGYPARYANAMAVGATDQNNRRASFSQYGTGIDIVAPGVGIQSTYLNNSYASMPGTSMATPHVAGVAALVKQKNPSWNATQIRNHLKNTATNLGNSSQFGSGLVNADAATR

SEQ ID NO: 67586 - protein, 268 aa, Unidentified
QTVPWGITRVQAPAVHNRGITGSGVRVAILDSGISTHEDLNVRGGVSFVPGEPTTADLNGHGTHVAGTVAALDNSIGVVGVAPSADLYAVKVLGANGRGSVSGIAQGLEWAAANNMHIANMSLGSDAPSSTLERAVNYATSRDVLVIAATGNNGSGTVGYPARYANAMAVGATDQNNRRANFSQYGTGIDIVAPGVNVQSTYPGNRYVSMSGTSMATPHVAGAAALVKQRYPSWNATQIRNHLKNTATNLGNSSQFGSGLVNAEAATR

SEQ ID NO: 67587 - protein, 268 aa, Unidentified
QVVPWGITRVQAPTVHNRGITGSGVKVAILDTGIAQHSDLTIRGGASFVPGESTTADLNGHGTHVSGTVAALNNSIGVIGVAPSADLYAVKVLGANGRGSVSGIAQGLEWAATNNMHIANMSLGSDAPSTTLERAVNYATSRGVLVIAATGNNGTGSIGYPARYANAMAVGATDQNNQRASFSQYGTGIDIVAPGVGIQSTYLNNSYASMPGTSMATPHVAGVAALVKQKNPSWNATQIRNHLKNTATNLGNSSQFGSGLVNADAATR

SEQ ID NO: 67588 - protein, 268 aa, Unidentified
QTVPWGITRVQAPTVHNRGITGSGVKVAILDTGIAQHSDLTIRGGASFVPGESTTADLNGHGTHVAGTVAALNNSIGVIGYAPSADLYAVKVLGANGRGSVSGIAQGLEWAATNNMHIANMSLGSDAPSTTLERAVNYATSRGVLVIAATGNNGTGSIGYPARYANAMAVGATDQNNRRASFSQYGTGIDIVAPGVGIQSTYLNNSYASMPGTSMATPHVAGVAALVKQKNPSWNATQIRNHLKNTATNLGNSSQFGSGLVNADAATR

SEQ ID NO: 67589 - protein, 268 aa, Unidentified
QTVPWGITRVQAPTVHNRGITGSGVKVAILDTGIAQHSDLTIRGGASFVPGESTTADLNGHGTHVAGTVAALDNSIGVIGVAPSADLYAVKVLGANGRGSVSGIAQGLEWAATNNMHIANMSLGSDAPSTTLERAVNYATSRGVLVIAATGNNGTGSIGYPARYANAMAVGATDQNNRRASFSQYGTGIDIVAPGVGIQSTYLNNSYASMPGTSMATPHVAGVAALVKQKNPSWNATQIRNHLKNTATNLGNSSQFGSGLVNADAATR

SEQ ID NO: 67590 - protein, 268 aa, Unidentified
QTVPWGITRVQAPTVHNRGITGSGVKVAILDTGIAQHSDLTIRGGASFVPGESTTADLNGHGTHVAGTVAALNNSIGVIGVAPSADLYAVKVLGANGRGSVSGIAQGLEWAATNNMHIANMSLGSDAYSTTLERAVNYATSRGVLVIAATGNNGTGSIGYPARYANAMAVGATDQNNRRASFSQYGTGIDIVAPGVGIQSTYLNNSYASMPGTSMATPHVAGVAALVKQKNPSWNATQIRNHLKNTATNLGNSSQFGSGLVNADAATR

SEQ ID NO: 67591 - protein, 268 aa, Bacillus gibsonii
QTVPWGITRVQAPAVHNRGITGSGVRVAILDSGISTHEDLNVRGGVSFVPGEPTYADLNGHGTHVAGTVAALNNSIGVVGVAPSADLYAVKVLGANGRGSVSGIAQGLEWAAQNNMHIANMSLGDDFPSSTLERAVNYATSRDVLVIAATGNNGSGSVGYPARYANAMAVGATDQNNRRANFSQYGTGIDIVAPGVNVQSTYPGNRYVSMNGTSMATPHVAGAAALVKQRYPSWNATQIRDHLKNTATNLGNSSQFGSGLVNAEAATR

SEQ ID NO: 67592 - protein, 268 aa, Unidentified
QTVPWGITRVQAPTVHNRGITGSGVKVAILDTGIAQHSDLTIRGGASFVPGESTTADLNGHGTHVAGTVAALNNSIGVIGVAPSADLYAVKVLGANGRGSVSGIAQGLEWAATNNMHIANMSLGSDAWSTTLERAVNYATSRGVLVIAATGNNGTGSIGYPARYANAMAVGATDQNNRRASFSQYGTGIDIVAPGVGIQSTYLNNSYASMPGTSMATPHVAGVAALVKQKNPSWNATQIRNHLKNTATNLGNSSQFGSGLVNADAATR

SEQ ID NO: 67593 - protein, 268 aa, Unidentified
QTVPWGITRVQAPTVHNRGITGSGVKVAILDTGIAQHSDLTIRGGASFVPGESTTADLNGHGTHVAGTVAALNNNIGVIGVAPSADLYAVKVLGANGRGSVSGIAQGLEWAATNNMHIANMSLGSDAPSTTLERAVNYATSRGVLVIAATGNNGTGSIQYPARYANAMAVGATDQNNRRASFSQYGTGIDIVAPGVGIQSTYLNNSYASMSGTSMATPHVAGVAALVKQKNPSWNATQIRNHLKNTATNLGPSSQFGSGLVNADAATR

SEQ ID NO: 67594 - protein, 268 aa, Unidentified
QTVPWGITRVQAPAVHNRGITGSGVRVAILDSGISTHEDLNIRGGVSFVPGEPTYADLNGHGTHVAGTVAALNNSIGVIGVAPNADLYAVKVLGANGRGSVSGIAQGLEWAAANNMHIANMSLGTDAPSSTLERAVNYATSRDVLVIAATGNNGSGSVGYPARYANAMAVGATDQNNRRANFSQYGTGIDIVAPGVNVQSTYPGNRYVSMNGTSMATPHVAGAAALVKQRYPSWNATQIRDHLKNTATNLGNSSQFGSGLVNAEAATR

SEQ ID NO: 67595 - protein, 268 aa, Unidentified
QTVPWGITRVQAPTVHNRGITGSGVKVAILDTGIAQHSDLTIRGGASFVPGESTTADLNGHGTHVAGTVAALNNSIGVIGVAPSADLYAVKVLGANGRGSVSGIAQGLEWAATNNMHIANMSLGSDAPSTTLERAVNYATSRGVLVIAATGNNGTGSIGYPARYANAMAVGATDQNNRRASFSQYGTGIDIVAPGVGIQSTYLNNSYASMPGTSMATPHVAGVAALVKQKNPSWNATQIRNHLKNTTTNLGNSSQFGSGLVNADAATR

SEQ ID NO: 67596 - protein, 268 aa, Unidentified
QTVPWGITRVQAPAVHNRGITGSGVRVAILDSGISTHEDLNVRGGVSFVPGETTYADLNGHGTHVAGTVAALNNSIGVVGVAPSADLYAVKVLGANGRGSVSGIAQGLEWAAQNNMHIANMSLGSTAPSSTLERAVNYATSRDVLVIAATGNNGSGSVGYPARYANAMAVGATDQNNRRANFSQYGTGIDIVAPGVNVQSTYPGNRYVSMNGTSMATPHVAGAAALVKQRYPSWNATQIRDHLKNTATNLGNSSQFGSGLVNAEAATR

SEQ ID NO: 67597 - protein, 268 aa, Unidentified
QTVPWGITRVQAPTVHNRGITGSGVKVAILDTGIAQHSDLTIRGGASFVPGESTTADLNGHGTHVAGTVAALNNSIGVIGVAPSADLCAVKVLGANGRGSVSGIAQGLEWAATNNMHIANMSLGSDAPSTTLERAVNYATSRGVLVIAATGNNGTGSIGYPARYANAMAVGATDQNNRRASFSQYGTGIDIVAPGVGIQSTYLNNSYASMPGTSMATPHVAGVAALVKQKNPSWNATQIRNHLKNTATNLGNSSQFGSGLVNADAATR

SEQ ID NO: 67598 - protein, 268 aa, Unidentified
QTVPWGITRVQAPAVHNRGITGFGVRVAILDSGISTHEDLNIRGGVSFVPGEPTTADLNGHGTHVAGTVAALDNSIGVVGVAPSADLYAVKVLGANGRGSVSGIAQGLEWAAQNNMHIANMSLGTDAPSSTLERAVNYATSRDVLVIAATGNNGSGSVGYPARYANAMAVGATDQNNRRANFSQYGTGIDIVAPGVNVQSTYPGNRYVSMSGTSMATPHVAGAAALVKQRYPSWNATQIRNHLKNTATNLGNSSQFGSGLVNAEAATR

SEQ ID NO: 67599 - protein, 268 aa, Unidentified
QTVPWGITRVQAPTVHNRGITGSGVKVAILDTGIAQHSDLTIRGGAYFVPGESTTADLNGHGTHVAGTVAALNNSIGVIGVAPSADLYAVKVLGANGRGSVSGIAQGLEWAATNNMHIANMSLGSDAPSTTLERAVNYATSRGVLVIAATGNNGTGSIGYPARYANAMAVGATDQNNRRASFSQYGTGIDIVAPGVGIQSTYLNNSYASMPGTSMATPHVAGVAALVKQKNPSWNATQIRNHLKNTATNLGNSSQFGSGLVNADAATR

SEQ ID NO: 67600 - protein, 268 aa, Unidentified
QTVPWGITRVQAPAVHNRGITGSGVRVAILDSGISAHSDLNIRGGASFVPGEPTTADLNGHGTHVAGTVAALDNSIGVVGVAPSADLYAVKVLGANGRGSVSGIAQGLEWAAQNNMHIANMSLGTDAPSSTLERAVNYATSADVLVIAATGNNGSGSVGYPARYANAMAVGATDQNNRRANFSQYGTGIDIVAPGVNVQSTYPGNRYVSMNGTSMATPHVAGAAALVKQRYPSWNATQIRDHLKNTATNLGNSSQFGSGLVNAEAATR

SEQ ID NO: 67601 - protein, 268 aa, Unidentified
QTVPWGITRVQAPAVHNRGITGSGVRVAILDSGISTHEDLNVRGGVSFVPGEPTYADLNGHGTHVAGTVAALNNSIGVVGVAPSADLYAVKVLGANGRGSVSGIAQGLEWAAQNNIHIANMSLGAEGPSSTLERAVNYATSRDVLVIAATGNNGSGSVGYPARYANAMAVGATDQNNRRANFSQYGTGIDIVAPGVNVQSTYPGNRYVSLNGTSMATPHVAGAAALVKQRYPSWNATQIRDHLKNTATNLGNSSQFGSGLVNAEAATR

SEQ ID NO: 67602 - protein, 268 aa, Unidentified
QTVPWGITRVQAPTVHNRGITGSGVKVAILDTGIAQHSDLTIRGGASFVPGESTTADLNGHGTHVAGTVAALNNSIGVIGVAPSADLYAVKVLGANGRGSVSGIAQGLEWAATNNMHIANMSLGSDATSTTLERAVNYATSRGVLVIAATGNNGTGSIGYPARYANAMAVGATDQNNRRASFSQYGTGIDIVAPGVGIQSTYLNNSYASMPGTSMATPHVAGVAALVKQKNPSWNATQIRNHLKNTATNLGNSSQFGSGLVNADAATR

SEQ ID NO: 67603 - protein, 268 aa, Unidentified
QTVPWGITRVQAPTVHNRGITGSGVKVAILDTGIAQHSDLTIRGGASFVPGESTTADLNGHGTHVAGTVAALNNSIGVIGVAPSADLYAVKVLGANGRGSVSGIAQGLEWAATNNMHIANMSLGSDALSTTLERAVNYATSRGVLVIAATGNNGTGSIGYPARYANAMAVGATDQNNRRASFSQYGTGIDIVAPGVGIQSTYLNNSYASMPGTSMATPHVAGVAALVKQKNPSWNATQIRNHLKNTATNLGNSSQFGSGLVNADAATR

SEQ ID NO: 67604 - protein, 268 aa, Unidentified
QTVPWGITRVQAPTVHNRGITGSGVKVAILDTGIAQHSDLTIRGGAPFVPGESTTADLNGHGTHVAGTVAALNNSIGVIGVAPSADLYAVKVLGANGRGSVSGIAQGLEWAATNNMHIANMSLGSDAPSTTLERAVNYATSRGVLVIAATGNNGTGSIGYPARYANAMAVGATDQNNRRASFSQYGTGIDIVAPGVGIQSTYLNNSYASMPGTSMATPHVAGVAALVKQKNPSWNATQIRNHLKNTATNLGNSSQFGSGLVNADAATR

SEQ ID NO: 67605 - protein, 268 aa, Unidentified
QTVPWGITRVQAPTVHNRGITGSGVKVAILDTGIAQHSDLTIRGGASFVPGESTTADLNGHGTHVAGTVAALNNCIGVIGVAPSADLYAVKVLGANGRGSVSGIAQGLEWAATNNMHIANMSLGSDAPSTTLERAVNYATSRGVLVIAATGNNGTGSIGYPARYANAMAVGATDQNNRRASFSQYGTGIDIVAPGVGIQSTYLNNSYASMPGTSMATPHVAGVAALVKQKNPSWNATQIRNHLKNTATNLGNSSQFGSGLVNADAATR

SEQ ID NO: 67606 - protein, 268 aa, Unidentified
QTVPWGITRVQAPTVHNRGITGSGVKVAILDTGIAQHSDLTIRGGASFVPGESTTADLNGHGTHVSGTVAALNNSIGVIGVAPSADLYAVKVLGANGRGSVSGIAQGLEWAATNNMHIANMSLGSDAPSTTLERAVNYATSRGVLVIAATGNNGTGSIGYPARYANAMAVGATDQNNRRASFSQYGTGIDIVAPGVGIQSTYLNNSYASMSGTSMATPHVAGVAALVKQKNPSWNATQIRNHLKNTATNLGPSSQFGSGLVNADAATR

SEQ ID NO: 67607 - protein, 268 aa, Unidentified
QTVPWGITRVQAPTVHNRGITGSGVKVAILDTGIAQHSDLTIRGGASFVPGESTTAILNGHGTHVAGTVAALNNSIGVIGVAPSADLYAVKVLGANGRGSVSGIAQGLEWAATNNMHIANMSLGSDAPSTTLERAVNYATSRGVLVIAATGNNGTGSIGYPARYANAMAVGATDQNNRRASFSQYGTGIDIVAPGVGIQSTYLNNSYASMPGTSMATPHVAGVAALVKQKNPSWNATQIRNHLKNTATNLGNSSQFGSGLVNADAATR

SEQ ID NO: 67608 - protein, 268 aa, Unidentified
QTVPWGITRVQAPTVHNRGITGSGVKVAILDTGIAQHSDLTIRGGASFVPGESTTADLNGHGTHVAGTVAALNNSIGVIGFAPSADLYAVKVLGANGRGSVSGIAQGLEWAATNNMHIANMSLGSDAPSTTLERAVNYATSRGVLVIAATGNNGTGSIGYPARYANAMAVGATDQNNRRASFSQYGTGIDIVAPGVGIQSTYLNNSYASMPGTSMATPHVAGVAALVKQKNPSWNATQIRNHLKNTATNLGNSSQFGSGLVNADAATR

SEQ ID NO: 67609 - protein, 268 aa, Unidentified
QTVPWGITRVQAPTVHNRGITGSGVKVAILDTGIAQHSDLTIRGGASFVPGESTTADLNGHGTHVAGTVAALNNSIGVIGVAPSADLYAVKVLGANGRGSVSGIAQGLEWAATNNMHIANMSLGSDAPSTTLERAVNYATSRGVLVIAATGNNGTGSIGYPARYANAMAVGATDQNNRRASFSQYGTGIDIVAPGVGIQSTYLNNSYASMPGTSMATPHVAGVAALVKQKNPSWNATQIRNHLKNTFTNLGNSSQFGSGLVNADAATR

SEQ ID NO: 67610 - protein, 268 aa, Unidentified
QTVPWGITRVQAPTVHNRGITGSGVKVAILDTGIAQHSILTIRGGASFVPGESTTADLNGHGTHVAGTVAALNNSIGVIGVAPSADLYAVKVLGANGRGSVSGIAQGLEWAATNNMHIANMSLGSDAPSTTLERAVNYATSRGVLVIAATGNNGTGSIGYPARYANAMAVGATDQNNRRASFSQYGTGIDIVAPGVGIQSTYLNNSYASMPGTSMATPHVAGVAALVKQKNPSWNATQIRNHLKNTATNLGNSSQFGSGLVNADAATR

SEQ ID NO: 67611 - protein, 268 aa, Unidentified
QTVPWGITRVQAPAVHNRGITGSGVRVAILDSGISTHEDLNVRGGVSFVPGEPTYADLNGHGTHVAGTVAALNNSIGVVGVAPSADLYAVKVLGANGRGSVSGIAQGLEWAAQNNMHIANMSLGQVCPSSTLERAVNYATSRDVLVIAATGNNGSGSVGYPARYANAMAVGATDQNNRRANFSQYGTGIDIVAPGVNVQSTYPGNRYVSMNGTSMATPHVAGAAALVKQRYPSWNATQIRDHLKNTATNLGNSSQFGSGLVNAEAATR

SEQ ID NO: 67612 - protein, 268 aa, Unidentified
QTVPWGITRVQAPTVHNRGITGSGVKVAILDTGIAQHSDLTIRGGASFVPGESTTADLNGHGTHVAGTVAALNNSIGVIGVAPSADLYAVKVLGANGRGSVSGIAQGLEWAATNNMHIANMSLGSDAPSTTLERAVNYATSRGVLVIAATGNNGTGSIGYPARYANAMAVGATDQNNRRASFSQYGTGIDIVAPGVGIQSTYLNNSYASMPGTSMATPHVAGVAALVKQKNPSWNATQIRNHLKNTITNLGNSSQFGSGLVNADAATR

SEQ ID NO: 67613 - protein, 268 aa, Unidentified
QTVPWGITRVQAPAVHNRGITGSGVRVAILDSGISTHEDLNVRGGVSFVPGETTYADLNGHGTHVAGTVAALNNSIGVVGVAPSADLYAVKVLGANGRGSVSGIAQGLEWAAQNNMHIANMSLGNEGPSSTLERAVNYATSRDVLVIAATGNNGSGSVGYPARYANAMAVGATDQNNRRANFSQYGTGIDIVAPGVNVQSTYPGNRYVSMNGTSMATPHVAGAAALVKQRYPSWNATQIRNHLKNTATNLGNSSQFGSGLVNAEAATR

SEQ ID NO: 67614 - protein, 268 aa, Unidentified
QTVPWGITRVQAPTVHNRGITGSGVKVAILDTGIAQHSDLTIRGGASFVPGESTTADLNGHGTHVAGTVAALNNSIGVIGVAPSADLYAVKVLGANGRGSVSGIAQGLEWAATNNMHIANMSLGSDAPSTTLERAVNYATSRGVLVIAATGNNGTGSIGYPARYANAMAVGATDENNRRASFSQYGTGIDIVAPGVGIQSTYLNNSYASMPGTSMATPHVAGVAALVKQKNPSWNATQIRNHLKNTATNLGNSSQFGSGLVNADAATR

SEQ ID NO: 67615 - protein, 268 aa, Unidentified
QTVPWGITRVQAPAVHNRGITGSGVRVAILDSGISTHEDLNVRGGVSFVPGETTYADLNGHGTHVAGTVAALNNSIGVVGVAPSADLYAVKVLGAAGRGSVSGIAQGLEWAAQNNMHIANMSLGAEGPSSTLERAVNYATSRDVLVIAATGNNGSGSVGYPARYANAMAVGATDQNNRRANFSQYGTGIDIVAPGVNVQSTYPGNRYVSMNGTSMATPHVAGAAALVKQRYPSWNATQIRNHLKNTATNLGNSSQFGSGLVNAEAATR

SEQ ID NO: 67616 - protein, 268 aa, Unidentified
QTVPWGITRVQAPTVHNRGITGSGVKVAILDTGIAQHSDLTIRGGASFVPGESTTADLNGHGTHVAGTVAALNNSIGVIGVAPSADLSAVKVLGANGRGSVSGIAQGLEWAATNNMHIANMSLGSDAPSTTLERAVNYATSRGVLVIAATGNNGTGSIGYPARYANAMAVGATDQNNRRASFSQYGTGIDIVAPGVGIQSTYLNNSYASMPGTSMATPHVAGVAALVKQKNPSWNATQIRNHLKNTATNLGNSSQFGSGLVNADAATR

SEQ ID NO: 67617 - protein, 268 aa, Unidentified
QTVPWGITRVQAPTVHNRGITGSGVKVAILDTGIAQHSDLTIRGGASFVPGESTTADLNGHGTHVAGTVAALNNSIGVIGVAPSADLYAVKVLGANGRGNVSGIAQGLEWAATNNMHIANMSLGSDAPSTTLERAVNYATSRGVLVIAATGNNGTGSIGYPARYANAMAVGATDQNNRRASFSQYGTGIDIVAPGVGIQSTYLNNSYASMPGTSMATPHVAGVAALVKQKNPSWNATQIRNHLKNTATNLGNSSQFGSGLVNADAATR

SEQ ID NO: 67618 - protein, 268 aa, Unidentified
QTVPWGITRVQAPTVHNRGITGSGVKVAILDTGIAQHSCLTIRGGASFVPGESTTADLNGHGTHVAGTVAALNNSIGVIGVAPSADLYAVKVLGANGRGSVSGIAQGLEWAATNNMHIANMSLGSDAPSTTLERAVNYATSRGVLVIAATGNNGTGSIGYPARYANAMAVGATDQNNRRASFSQYGTGIDIVAPGVGIQSTYLNNSYASMPGTSMATPHVAGVAALVKQKNPSWNATQIRNHLKNTATNLGNSSQFGSGLVNADAATR

SEQ ID NO: 67619 - protein, 268 aa, Unidentified
QTVPWGITRVQAPTVHNRGITGSGVKVAILDTGIAQHSNLTIRGGASFVPGESTTADLNGHGTHVAGTVAALNNSIGVIGVAPSADLYAVKVLGANGRGSVSGIAQGLEWAATNNMHIANMSLGSDAPSTTLERAVNYATSRGVLVIAATGNNGTGSIGYPARYANAMAVGATDQNNRRASFSQYGTGIDIVAPGVGIQSTYLNNSYASMPGTSMATPHVAGVAALVKQKNPSWNATQIRNHLKNTATNLGNSSQFGSGLVNADAATR

SEQ ID NO: 67620 - protein, 268 aa, Unidentified
QTVPWGITRVQAPTVHNRGITGSGVKVAILDTGIAQHSDLTIRGGASFVPGESTTADLNGHGTHVAGTVAALNNSIGVIGVAPSADLYAVKVLGANGRGSVSGIAQGLEWAATNNMHIANMSLGSDAPPTTLERAVNYATSRGVLVIAATGNNGTGSIGYPARYANAMAVGATDQNNRRASFSQYGTGIDIVAPGVGIQSTYLNNSYASMPGTSMATPHVAGVAALVKQKNPSWNATQIRNHLKNTATNLGNSSQFGSGLVNADAATR

SEQ ID NO: 67621 - protein, 268 aa, Unidentified
QVVPWGITRVQAPAVHNRGITGSGVRVAILDSGISAHEDLNIRGGASFVPGEPTTADLNGHGTHVSGTVAALDNNIGVIGVAPNAELYAVKVLGANGRGSVSGIAQGLEWAATNNMHIANMSLGSDFPSSTLERAVNYATSRDVLVIAATGNNGSGSVGYPARYANAMAVGATDQNNRRANFSQYGTGIDIVAPGVNVQSTYPGNRYVSMSGTSMATPHVAGAAALVKQRYPSWNATQIRNHLKNTATNLGPSSQFGSGLVNAEAATR

SEQ ID NO: 67622 - protein, 268 aa, Unidentified
QTVPWGITRVQAPTVHNRGITGSGVKVAILDTGIAQHSDLTIRGGASFVPGESTTADLNGHGTHVAGTVAALNNSIGVIGVAPSADLLAVKVLGANGRGSVSGIAQGLEWAATNNMHIANMSLGSDAPSTTLERAVNYATSRGVLVIAATGNNGTGSIGYPARYANAMAVGATDQNNRRASFSQYGTGIDIVAPGVGIQSTYLNNSYASMPGTSMATPHVAGVAALVKQKNPSWNATQIRNHLKNTATNLGNSSQFGSGLVNADAATR

SEQ ID NO: 67623 - protein, 268 aa, Unidentified
QTVPWGITRVQAPAVHNRGITGSGVRVAILDSGISAHEDLNIRGGASFVPGEPTTADLNGHGTHVAGTVAALDNSIGVIGVAPNAELYAVKVLGANGRGSVSGIAQGLEWAATNNMHIANMSLGAEGPSSTLERAVNYATSRDVLVIAATGNNGSGSVGYPARYANAMAVGATDQNNRRANFSQYGTGIDIVAPGVNVLSTYPGNRYVSMNGTSMATPHVAGAAALVKQRYPSWNATQIRDHLKNTATNLGNSSEFGSGLVNAEAATR

SEQ ID NO: 67624 - protein, 268 aa, Unidentified
QTVPWGITRVQAPAVHNRGITGSGVRVAILDSGISTHEDLNVRGGVSFVPGEPTYADLNGHGTHVAGTVAALNNSIGVVGVAPSADLYAVKVLGANGRGSVSGIAQGLEWAAQNNMHIANMSLGADGPSSTLERAVNYATSRDVLVIAATGNNGSGSVGYPARYANAMAVGATDQNNRRANFSQYGTGIDIVAPGVNVQSTYPGNRYVSMNGTSMATPHVAGAAALVKQRYPSWNATQIRDHLKNTATNLGNSSQFGSGLVNAEAATR

SEQ ID NO: 67625 - protein, 268 aa, Unidentified
QTVPWGITRVQAPTVHNRGITGSGVKVAILDTGIAQWSDLTIRGGASFVPGESTTADLNGHGTHVAGTVAALNNSIGVIGVAPSADLYAVKVLGANGRGSVSGIAQGLEWAATNNMHIANMSLGSDAPSTTLERAVNYATSRGVLVIAATGNNGTGSIGYPARYANAMAVGATDQNNRRASFSQYGTGIDIVAPGVGIQSTYLNNSYASMPGTSMATPHVAGVAALVKQKNPSWNATQIRNHLKNTATNLGNSSQFGSGLVNADAATR

SEQ ID NO: 67626 - protein, 268 aa, Unidentified
QTVPWGITRVQAPTVHNRGITGSGVKVAILDTGIAQHSDLTIRGGASFVPGESTTADLNGHGTHVAGTVAALNNSIGVIGVAPSADLYAVKVLGANGRGKVSGIAQGLEWAATNNMHIANMSLGSDAPSTTLERAVNYATSRGVLVIAATGNNGTGSIGYPARYANAMAVGATDQNNRRASFSQYGTGIDIVAPGVGIQSTYLNNSYASMPGTSMATPHVAGVAALVKQKNPSWNATQIRNHLKNTATNLGNSSQFGSGLVNADAATR

SEQ ID NO: 67627 - protein, 268 aa, Unidentified
QVVPWGITRVQAPTVHNRGITGSGVKVAILDTGIAQHSDLTIRGGASFVPGESTTADLNGHGTHVAGTVAALDNSIGVIGVAPSADLYAVKVLGANGRGSVSGIAQGLEWAATNNMHIANMSLGSDAPSTTLERAVNYATSRGVLVIAATGNNGTGSIGYPARYANAMAVGATDQNNRRASFSQYGTGIDIVAPGVGIQSTYLNNSYASMPGTSMATPHVAGVAALVKQKNPSWNATQIRNHLKNTATNLGPSSQFGSGLVNADAATR

SEQ ID NO: 67628 - protein, 268 aa, Unidentified
QTVPWGITRVQAPAVHNRGITGSGVRVAILDSGISTHEDLNVRGGVSFVPGETTYADLNGHGTHVAGTVAALNNSIGVVGVAPSADLYAVKVLGANGRGSVSGIAQGLEWAAENNMHIANMSLGAEGPSSTLERAVNYATSRDVLVIAATGNNGSGSVGYPARYANAMAVGATDQNNRRANFSQYGTGIDIVAPGVNVQSTYPGNRYVSMNGTSMATPHVAGAAALVKQRYPSWNATQIRNHLKNTATNLGNSSQFGSGLVNAEAATR

SEQ ID NO: 67629 - protein, 268 aa, Unidentified
QTVPWGITRVQAPTVHNRGITGSGVKVAILDTGIAQHSDLTIRGGASFVPGESTTADLNGHGTHVAGTVAALDNSIGVIGVAPSADLYAVKVLGANGRGSVSGIAQGLEWAATNNMHIANMSLGSDAPSTTLERAVNYATSRGVLVIAATGNNGTGSIGYPARYANAMAVGATDQNNQRASFSQYGTGIDIVAPGVGIQSTYLNNSYASMSGTSMATPHVAGVAALVKQKNPSWNATQIRNHLKNTATNLGNSSQFGSGLVNADAATR

SEQ ID NO: 67630 - protein, 268 aa, Unidentified
QTVPWGITRVQAPAVHNRGITGSGVRVAILDSGISTHEDLNVRGGVSFVPGEPTYADLNGHGTHVAGTVAALNNSIGVVGVAPSADLYAVKVLGANGRGSVSGIAQGLEWAAQNNMHIANMSLGLHEPSSTLERAVNYATSRDVLVIAATGNNGSGSVGYPARYANAMAVGATDQNNRRANFSQYGTGIDIVAPGVNVQSTYPGNRYVSMNGTSMATPHVAGAAALVKQRYPSWNATQIRDHLKNTATNLGNSSQFGSGLVNAEAATR

SEQ ID NO: 67631 - protein, 268 aa, Unidentified
QTVPWGITRVQAPAVHNRGITGSGVRVAILDSGISTHEDLNVRGGVSFVPGEPTYADLNGHGTHVAGTVAALNNSIGVVGVAPSADLYAVKVLGANGRGSVSGIAQGLEWAAQNNMHIANMSLGAEGPSSTLERAVNYATSRDVLVIAATGNNGSGSVGYPARYANAMAVGATDQNNRRANFSQYGTGIDIVAPGVNVQSTYPGNRYVSMNGTSMATPHVAGAAALVKQRYPSWNATQIRDHLKNTATNLGNSSQFGSGLVNAEAATR

SEQ ID NO: 67632 - protein, 268 aa, Unidentified
QTVPWGITRVQAPTVHNRGITGSGVKVAILDTGIAQHSDLTIRGGASFVPGESTTADLNGHGTHVAGTVAALNNSIGVIGVAPSADLYAVKVLGANGRGSVSGIAQGLEWAATNNMHIANMSLGSDAPTTTLERAVNYATSRGVLVIAATGNNGTGSIGYPARYANAMAVGATDQNNRRASFSQYGTGIDIVAPGVGIQSTYLNNSYASMPGTSMATPHVAGVAALVKQKNPSWNATQIRNHLKNTATNLGNSSQFGSGLVNADAATR

SEQ ID NO: 67633 - protein, 268 aa, Unidentified
QTVPWGITRVQAPTVHNRGITGSGVKVAILDTGIAQHSDLTIRGGASFVPGESTTADLNGHGTHVAGTVAALNNSIGVIGVAPSADLHAVKVLGANGRGSVSGIAQGLEWAATNNMHIANMSLGSDAPSTTLERAVNYATSRGVLVIAATGNNGTGSIGYPARYANAMAVGATDQNNRRASFSQYGTGIDIVAPGVGIQSTYLNNSYASMPGTSMATPHVAGVAALVKQKNPSWNATQIRNHLKNTATNLGNSSQFGSGLVNADAATR

SEQ ID NO: 67634 - protein, 268 aa, Unidentified
QTVPWGITRVQAPTVHNRGITGSGVKVAILDTGIAQHSDLTIRGGASFVPGESTTADLNGHGTHVAGTVAALNNSIGVIGVAPSADLYAVKVLGANGRGSVSGIAQGLEWAATNNMHIANMSLGSDAPITTLERAVNYATSRGVLVIAATGNNGTGSIGYPARYANAMAVGATDQNNRRASFSQYGTGIDIVAPGVGIQSTYLNNSYASMPGTSMATPHVAGVAALVKQKNPSWNATQIRNHLKNTATNLGNSSQFGSGLVNADAATR

SEQ ID NO: 67635 - protein, 268 aa, Unidentified
QTVPWGITRVQAPTVHNRGITGSGVKVAILDTGIAQHEDLTIRGGASFVPGESTTADLNGHGTHVSGTVAALNNSIGVIGVAPSADLYAVKVLGANGRGSVSGIAQGLEWAATNNMHIANMSLGSDAPSTTLERAVNYATSRGVLVIAATGNNGTGSIGYPARYANAMAVGATDQNNRRASFSQYGTGIDIVAPGVGIQSTYLNNSYASMPGTSMATPHVAGVAALVKQKNPSWNATQIRNHLKNTATNLGNSSQFGSGLVNADAATR

SEQ ID NO: 67636 - protein, 268 aa, Unidentified
QTVPWGITRVQAPAVHNRGITGSGVRVAILDSGISTHEDLNVRGGVSFVPGETTYADLNGHGTHVAGTVAALNNSIGVVGVAPSADLYAVKVLGANGEGSVSGIAQGLEWAAQNNMHIANMSLGSEGPSSTLERAVNYATSRDVLVIAATGNNGSGSVGYPARYANAMAVGATDQNNRRANFSQYGTGIDIVAPGVNVQSTYPGNRYVSMNGTSMATPHVAGAAALVKQRYPSWNATQIRDHLKNTATNLGNSSQFGSGLVNAEAATR

SEQ ID NO: 67637 - protein, 268 aa, Unidentified
QTVPWGITRVQAPTVHNRGITGSGVKVAILDTGIAQHSDLTIRGGASFVPGESTTADLNGHGTHVAGTVAALNNSIGVIGVAPSADLYAVKVLGANGRGLVSGIAQGLEWAATNNMHIANMSLGSDAPSTTLERAVNYATSRGVLVIAATGNNGTGSIGYPARYANAMAVGATDQNNRRASFSQYGTGIDIVAPGVGIQSTYLNNSYASMPGTSMATPHVAGVAALVKQKNPSWNATQIRNHLKNTATNLGNSSQFGSGLVNADAATR

SEQ ID NO: 67638 - protein, 268 aa, Unidentified
QTVPWGITRVQAPTVHNRGITGSGVKVAILDTGIAQHSDLTIRGGASFVPGESTTADLNGHGTHVAGTVAALNNAIGVIGVAPSADLYAVKVLGANGRGSVSGIAQGLEWAATNNMHIANMSLGSDAPSTTLERAVNYATSRGVLVIAATGNNGTGSIGYPARYANAMAVGATDQNNRRASFSQYGTGIDIVAPGVGIQSTYLNNSYASMPGTSMATPHVAGVAALVKQKNPSWNATQIRNHLKNTATNLGNSSQFGSGLVNADAATR

SEQ ID NO: 67639 - protein, 268 aa, Unidentified
QTVPWGITRVQAPAVHNRGITGSGVRVAILDSGISTHEDLNVRGGVSFVPGEPGTADLNGHGTHVAGTVAALNNSIGVIGVAPNAELYAVKVLGANGRGSISGIAQGLEWAAQNNMHIANMSLGTDAPSSTLERAVNYATSRDVLVIAATGNNGSGSVGYPARYANAMAVGATDQNNRRANFSQYGTGIDIVAPGVNVQSTYPGNRYVSMSGTSMATPHVAGAAALVKQRYPSWNATQIRNHLKNTATNLGNSSQFGSGLVNAEAATR

SEQ ID NO: 67640 - protein, 268 aa, Unidentified
QTVPWGITRVQAPTVHNRGITGSGVKVAILDTGIAQHSDLTIRGGASFVPGESTTATLNGHGTHVAGTVAALNNSIGVIGVAPSADLYAVKVLGANGRGSVSGIAQGLEWAATNNMHIANMSLGSDAPSTTLERAVNYATSRGVLVIAATGNNGTGSIGYPARYANAMAVGATDQNNRRASFSQYGTGIDIVAPGVGIQSTYLNNSYASMPGTSMATPHVAGVAALVKQKNPSWNATQIRNHLKNTATNLGNSSQFGSGLVNADAATR

SEQ ID NO: 67641 - protein, 268 aa, Unidentified
QTVPWGITRVQAPTVHNRGITGSGVKVAILDTGIAQHSDLTIRGGASFVPGESTTADLNGHGTHVAGTVAALNNSIGVIGVAPSADLYAVKVLGANGRGCVSGIAQGLEWAATNNMHIANMSLGSDAPSTTLERAVNYATSRGVLVIAATGNNGTGSIGYPARYANAMAVGATDQNNRRASFSQYGTGIDIVAPGVGIQSTYLNNSYASMPGTSMATPHVAGVAALVKQKNPSWNATQIRNHLKNTATNLGNSSQFGSGLVNADAATR

SEQ ID NO: 67642 - protein, 268 aa, Unidentified
QTVPWGIERVQAPTVHNRGITGSGVKVAILDTGIAQHSDLTIRGGASFVPGESTTADLNGHGTHVAGTVAALDNSIGVIGVAPSADLYAVKVLGANGRGSVSGIAQGLEWAATNNMHIANMSLGSDAPSTTLERAVNYATSRGVLVIAATGNNGTGSIGYPARYANAMAVGATDQNNRRASFSQYGTGIDIVAPGVGIQSTYLNNSYASMSGTSMATPHVAGVAALVKQKNPSWNATQIRNHLKNTATNLGNSSQFGSGLVNADAATR

SEQ ID NO: 67643 - protein, 268 aa, Unidentified
QTVPWGITRVQAPTVHNRGITGSGVKVAILDTGIAQHSDLTIRGGASFVPGESTTADLNGHGTHVAGTVAALNNSIGVIGVAPSADLRAVKVLGANGRGSVSGIAQGLEWAATNNMHIANMSLGSDAPSTTLERAVNYATSRGVLVIAATGNNGTGSIGYPARYANAMAVGATDQNNRRASFSQYGTGIDIVAPGVGIQSTYLNNSYASMPGTSMATPHVAGVAALVKQKNPSWNATQIRNHLKNTATNLGNSSQFGSGLVNADAATR

SEQ ID NO: 67644 - protein, 268 aa, Unidentified
QTVPWGITRVQAPTVHNRGITGSGVKVAILDTGIAQHSDLTIRGGASFVPGESTTADLNGHGTHVAGTVAALNNNIGVIGVAPSADLYAVKVLGANGRGSVSGIAQGLEWAATNNMHIANISLGSDAPSTTLERAVNYATSRGVLVIAATGNNGTGSIGYPARYANAMAVGATDQNNRRASFSQYGTGIDIVAPGVGIQSTYLNNSYASMPGTSMATPHVAGVAALVKQKNPSWNATQIRNHLKNTATNLGNSSQFGSGLVNADAATR

SEQ ID NO: 67645 - protein, 268 aa, Unidentified
QTVPWGITRVQAPTVHNRGITGSGVKVAILDTGIAQHSDLTIRGGATFVPGESTTADLNGHGTHVAGTVAALNNSIGVIGVAPSADLYAVKVLGANGRGSVSGIAQGLEWAATNNMHIANMSLGSDAPSTTLERAVNYATSRGVLVIAATGNNGTGSIGYPARYANAMAVGATDQNNRRASFSQYGTGIDIVAPGVGIQSTYLNNSYASMPGTSMATPHVAGVAALVKQKNPSWNATQIRNHLKNTATNLGNSSQFGSGLVNADAATR

SEQ ID NO: 67646 - protein, 268 aa, Unidentified
QTVPWGITRVQAPTVHNRGITGSGVKVAILDTGIAQHSYLTIRGGASFVPGESTTADLNGHGTHVAGTVAALNNSIGVIGVAPSADLYAVKVLGANGRGSVSGIAQGLEWAATNNMHIANMSLGSDAPSTTLERAVNYATSRGVLVIAATGNNGTGSIGYPARYANAMAVGATDQNNRRASFSQYGTGIDIVAPGVGIQSTYLNNSYASMPGTSMATPHVAGVAALVKQKNPSWNATQIRNHLKNTATNLGNSSQFGSGLVNADAATR

SEQ ID NO: 67647 - protein, 268 aa, Unidentified
QTVPWGITRVQAPTVHNRGITGSGVKVAILDTGIAQHSDLTIRGGASFVPGESTTADLNGHGTHVAGTVAALNNNIGVIGVAPSADLYAVKVLGANGRGSVSGIAQGLEWAATNNMHIANMSLGSDAPSTTLERAVNYATSRGVLVIAATGNNGTGSIGYPARYANAMAVGATDQNNQRASFSQYGTGIDIVAPGVGIQSTYLNNSYASMSGTSMATPHVAGVAALVKQKNPSWNATQIRNHLKNTATNLGNSSQFGSGLVNADAATR

SEQ ID NO: 67648 - protein, 268 aa, Unidentified
QTVPWGITRVQAPAVHNRGITGSGVRVAILDSGISTHEDLNVRGGVSFVPGETTYADLNGHGTHVAGTVAALNNSIGVVGVAPSAELYAVKVLGANGRGSVSGIAQGLEWAAQNNMHIANMSLGAEGPSSTLERAVNYATSRDVLVIAATGNNGSGSVGYPARYANAMAVGATDQNNRRANFSQYGTGIDIVAPGVNVQSTYPGNRYVSMNGTSMATPHVAGAAALVKQRYPSWNATQIRDHLKNTATNLGNSSQFGSGLVNAEAATR

SEQ ID NO: 67649 - protein, 268 aa, Unidentified
QVVPWGITRVQAPTVHNRGITGSGVKVAILDTGIAQHEDLTIRGGASFVPGESTTADLNGHGTHVAGTVAALDNSIGVIGVAPSADLYAVKVLGANGRGSVSGIAQGLEWAATNNMHIANMSLGSDAPSTTLERAVNYATSRGVLVIAATGNNGTGSIGYPARYANAMAVGATDQNNRRASFSQYGTGIDIVAPGVGIQSTYLNNSYASMPGTSMATPHVAGVAALVKQKNPSWNATQIRNHLKNTATNLGNSSQFGSGLVNADAATR

SEQ ID NO: 67650 - protein, 268 aa, Unidentified
QTVPWGITRVQAPTVHNRGITGSGVKVAILDTGIAQHSDLTIRGGASFVPGESTTAKLNGHGTHVAGTVAALNNSIGVIGVAPSADLYAVKVLGANGRGSVSGIAQGLEWAATNNMHIANMSLGSDAPSTTLERAVNYATSRGVLVIAATGNNGTGSIGYPARYANAMAVGATDQNNRRASFSQYGTGIDIVAPGVGIQSTYLNNSYASMPGTSMATPHVAGVAALVKQKNPSWNATQIRNHLKNTATNLGNSSQFGSGLVNADAATR

SEQ ID NO: 67651 - protein, 268 aa, Unidentified
QTVPWGITRVQAPTVHNRGITGSGVKVAILDTGIAQHSVLTIRGGASFVPGESTTADLNGHGTHVAGTVAALNNSIGVIGVAPSADLYAVKVLGANGRGSVSGIAQGLEWAATNNMHIANMSLGSDAPSTTLERAVNYATSRGVLVIAATGNNGTGSIGYPARYANAMAVGATDQNNRRASFSQYGTGIDIVAPGVGIQSTYLNNSYASMPGTSMATPHVAGVAALVKQKNPSWNATQIRNHLKNTATNLGNSSQFGSGLVNADAATR

SEQ ID NO: 67652 - protein, 268 aa, Unidentified
QTVPWGITRVQAPTVHNRGITGSGVKVAILDTGIAQHSDLTIRGGASFVPGESTTADLNGHGTHVAGTVAALDNSIGVIGVAPSADLYAVKVLGANGRGSVSGIAQGLEWAATNNMHIANMSLGSDAPSTTLERAVNYATSRGVLVIAATGNNGTGSIGYPARYANAMAVGATDQNNRRASFSQYGTGIDIVAPGVGIQSTYLNNSYASMSGTSMATPHVAGVAALVKQKNPSWNATQIRNHLKNTATNLGPSSQFGSGLVNADAATR

SEQ ID NO: 67653 - protein, 268 aa, Unidentified
QTVPWGITRVQAPTVHNRGITGSGVKVAILDTGIAQHSDLTIRGGASFVPGESTTADLNGHGTHVAGTVAALNNSIGVIGVAPSADLYAVKVLGANGRGSVSGIAQGLEWAATNNMHIANMSLGSDADSTTLERAVNYATSRGVLVIAATGNNGTGSIGYPARYANAMAVGATDQNNRRASFSQYGTGIDIVAPGVGIQSTYLNNSYASMPGTSMATPHVAGVAALVKQKNPSWNATQIRNHLKNTATNLGNSSQFGSGLVNADAATR

SEQ ID NO: 67654 - protein, 268 aa, Unidentified
QTVPWGITRVQAPTVHNRGITGSGVKVAILDTGIAQYSDLTIRGGASFVPGESTTADLNGHGTHVAGTVAALNNSIGVIGVAPSADLYAVKVLGANGRGSVSGIAQGLEWAATNNMHIANMSLGSDAPSTTLERAVNYATSRGVLVIAATGNNGTGSIGYPARYANAMAVGATDQNNRRASFSQYGTGIDIVAPGVGIQSTYLNNSYASMPGTSMATPHVAGVAALVKQKNPSWNATQIRNHLKNTATNLGNSSQFGSGLVNADAATR

SEQ ID NO: 67655 - protein, 268 aa, Unidentified
QVVPWGITRVQAPTVHNRGITGSGVKVAILDTGIAQHSDLTIRGGASFVPGESTTADLNGHGTHVAGTVAALDNSIGVIGVAPSADLYAVKVLGANGRGSVSGIAQGLEWAATNNMHIANMSLGSDAPSTTLERAVNYATSRGVLVIAATGNNGTGSIGYPARYANAMAVGATDQNNQRASFSQYGTGIDIVAPGVGIQSTYLNNSYASMPGTSMATPHVAGVAALVKQKNPSWNATQIRNHLKNTATNLGNSSQFGSGLVNADAATR

SEQ ID NO: 67656 - protein, 268 aa, Unidentified
QTVPWGITRVQAPTVHNRGITGSGVKVAILDTGIAQHSTLTIRGGASFVPGESTTADLNGHGTHVAGTVAALNNSIGVIGVAPSADLYAVKVLGANGRGSVSGIAQGLEWAATNNMHIANMSLGSDAPSTTLERAVNYATSRGVLVIAATGNNGTGSIGYPARYANAMAVGATDQNNRRASFSQYGTGIDIVAPGVGIQSTYLNNSYASMPGTSMATPHVAGVAALVKQKNPSWNATQIRNHLKNTATNLGNSSQFGSGLVNADAATR

SEQ ID NO: 67657 - protein, 268 aa, Unidentified
QTVPWGIERVQAPTVHNRGITGSGVKVAILDTGIAQHSDLTIRGGASFVPGESTTADLNGHGTHVSGTVAALNNSIGVIGVAPSADLYAVKVLGANGRGSVSGIAQGLEWAATNNMHIANMSLGSDAPSTTLERAVNYATSRGVLVIAATGNNGTGSIGYPARYANAMAVGATDQNNRRASFSQYGTGIDIVAPGVGIQSTYLNNSYASMPGTSMATPHVAGVAALVKQKNPSWNATQIRNHLKNTATNLGNSSQFGSGLVNADAATR

SEQ ID NO: 67658 - protein, 268 aa, Unidentified
QTVPWGITRVQAPTVHNRGITGSGVKVAILDTGIAQHSDLTIRGGAVFVPGESTTADLNGHGTHVAGTVAALNNSIGVIGVAPSADLYAVKVLGANGRGSVSGIAQGLEWAATNNMHIANMSLGSDAPSTTLERAVNYATSRGVLVIAATGNNGTGSIGYPARYANAMAVGATDQNNRRASFSQYGTGIDIVAPGVGIQSTYLNNSYASMPGTSMATPHVAGVAALVKQKNPSWNATQIRNHLKNTATNLGNSSQFGSGLVNADAATR

SEQ ID NO: 67659 - protein, 268 aa, Unidentified
QTVPWGITRVQAPTVHNRGITGSGVKVAILDTGIAQHSPLTIRGGASFVPGESTTADLNGHGTHVAGTVAALNNSIGVIGVAPSADLYAVKVLGANGRGSVSGIAQGLEWAATNNMHIANMSLGSDAPSTTLERAVNYATSRGVLVIAATGNNGTGSIGYPARYANAMAVGATDQNNRRASFSQYGTGIDIVAPGVGIQSTYLNNSYASMPGTSMATPHVAGVAALVKQKNPSWNATQIRNHLKNTATNLGNSSQFGSGLVNADAATR

SEQ ID NO: 67660 - protein, 268 aa, Unidentified
QTVPWGITRVQAPAVHNRGITGSGVRVAILDSGISAHEDLNIRGGASFVPGEPTTADLNGHGTHVSGTVAALDNNIGVIGVAPNAELYAVKVLGANGRGSVSGIAQGLEWAATNNMHIANMSLGSDFPSSTLERAVNYATSRDVLVIAATGNNGSGSVGYPARYANAMAVGATDQNNRRANFSQYGTGIDIVAPGVNVQSTYPGNRYVSMSGTSMATPHVAGAAALVKQRYPSWNATQIRNHLKNTATNLGPSSQFGSGLVNAEAATR

SEQ ID NO: 67661 - protein, 268 aa, Unidentified
QTVPWGITRVQAPAVHNRGITGSGVRVAILDSGISTHEDLNVRGGVSFVPGETTYADLNGHGTHVAGTVAALNNSIGVVGVAPSADLYAVKVLGANGRGSVSGIAQGLEWAAQNNMHIANMSLGAEEPSSTLERAVNYATSRDVLVIAATGNNGSGSVGYPARYANAMAVGATDQNNRRANFSQYGTGIDIVAPGVNVQSTYPGNRYVSMNGTSMATPHVAGAAALVKQRYPSWNATQIRNHLKNTATNLGNSSQFGSGLVNAEAATR

SEQ ID NO: 67662 - protein, 268 aa, Unidentified
QTVPWGITRVQAPAVHNRGITGSGVRVAILDSGISTHEDLNVRGGVSFVPGETTYADLNGHGTHVAGTVAALNNSIGVVGVAPSADLYAVKVLGANGVGSVSGIAQGLEWAAQNNMHIANMSLGAEGPSSTLERAVNYATSRDVLVIAATGNNGSGSVGYPARYANAMAVGATDQNNRRANFSQYGTGIDIVAPGVNVQSTYPGNRYVSMNGTSMATPHVAGAAALVKQRYPSWNATQIRNHLKNTATNLGNSSQFGSGLVNAEAATR

SEQ ID NO: 67663 - protein, 268 aa, Unidentified
QVVPWGITRVQAPTVHNRGITGSGVKVAILDTGIAQHSDLTIRGGASFVPGESTTADLNGHGTHVSGTVAALNNSIGVIGVAPSADLYAVKVLGANGRGSVSGIAQGLEWAATNNMHIANMSLGSDAPSTTLERAVNYATSRGVLVIAATGNNGTGSIGYPARYANAMAVGATDQNNRRASFSQYGTGIDIVAPGVGIQSTYLNNSYASMSGTSMATPHVAGVAALVKQKNPSWNATQIRNHLKNTATNLGNSSQFGSGLVNADAATR

SEQ ID NO: 67664 - protein, 268 aa, Unidentified
QTVPWGITRVQAPTVHNRGITGSGVKVAILDTGIAQHSDLTIRGGAWFVPGESTTADLNGHGTHVAGTVAALNNSIGVIGVAPSADLYAVKVLGANGRGSVSGIAQGLEWAATNNMHIANMSLGSDAPSTTLERAVNYATSRGVLVIAATGNNGTGSIGYPARYANAMAVGATDQNNRRASFSQYGTGIDIVAPGVGIQSTYLNNSYASMPGTSMATPHVAGVAALVKQKNPSWNATQIRNHLKNTATNLGNSSQFGSGLVNADAATR

SEQ ID NO: 67665 - protein, 268 aa, Unidentified
QTVPWGITRVQAPAVHNRGITGSGVRVAILDSGISTHEDLNVRGGVSFVPGEPTYADLNGHGTHVAGTVAALNNSIGVVGVAPSADLYAVKVLGANGRGSVSGIAQGLEWAAQNNMHIANMSLGWNDPSSTLERAVNYATSRDVLVIAATGNNGSGSVGYPARYANAMAVGATDQNNRRANFSQYGTGIDIVAPGVNVQSTYPGNRYVSMNGTSMATPHVAGAAALVKQRYPSWNATQIRDHLKNTATNLGNSSQFGSGLVNAEAATR

SEQ ID NO: 67666 - protein, 268 aa, Unidentified
QTVPWGITRVQAPTVHNRGITGSGVKVAILDTGIAQHSDLTIRGGAHFVPGESTTADLNGHGTHVAGTVAALNNSIGVIGVAPSADLYAVKVLGANGRGSVSGIAQGLEWAATNNMHIANMSLGSDAPSTTLERAVNYATSRGVLVIAATGNNGTGSIGYPARYANAMAVGATDQNNRRASFSQYGTGIDIVAPGVGIQSTYLNNSYASMPGTSMATPHVAGVAALVKQKNPSWNATQIRNHLKNTATNLGNSSQFGSGLVNADAATR

SEQ ID NO: 67667 - protein, 268 aa, Unidentified
QTVPWGITRVQAPTVHNRGITGSGVKVAILDTGIAQHSDLTIRGGAIFVPGESTTADLNGHGTHVAGTVAALNNSIGVIGVAPSADLYAVKVLGANGRGSVSGIAQGLEWAATNNMHIANMSLGSDAPSTTLERAVNYATSRGVLVIAATGNNGTGSIGYPARYANAMAVGATDQNNRRASFSQYGTGIDIVAPGVGIQSTYLNNSYASMPGTSMATPHVAGVAALVKQKNPSWNATQIRNHLKNTATNLGNSSQFGSGLVNADAATR

SEQ ID NO: 67668 - protein, 268 aa, Unidentified
QTVPWGITRVQAPTVHNRGITGSGVKVAILDTGIAQHSDLTIRGGASFVPGESTTADLNGHGTHVAGTVAALNNSIGVIGIAPSADLYAVKVLGANGRGSVSGIAQGLEWAATNNMHIANMSLGSDAPSTTLERAVNYATSRGVLVIAATGNNGTGSIGYPARYANAMAVGATDQNNRRASFSQYGTGIDIVAPGVGIQSTYLNNSYASMPGTSMATPHVAGVAALVKQKNPSWNATQIRNHLKNTATNLGNSSQFGSGLVNADAATR

SEQ ID NO: 67669 - protein, 268 aa, Unidentified
QTVPWGITRVQAPTVHNRGITGSGVKVAILDTGIAQHSSLTIRGGASFVPGESTTADLNGHGTHVAGTVAALNNSIGVIGVAPSADLYAVKVLGANGRGSVSGIAQGLEWAATNNMHIANMSLGSDAPSTTLERAVNYATSRGVLVIAATGNNGTGSIGYPARYANAMAVGATDQNNRRASFSQYGTGIDIVAPGVGIQSTYLNNSYASMPGTSMATPHVAGVAALVKQKNPSWNATQIRNHLKNTATNLGNSSQFGSGLVNADAATR

SEQ ID NO: 67670 - protein, 268 aa, Unidentified
QTVPWGITRVQAPTVHNRGITGSGVKVAILDTGIAQHSDLTIRGGASFVPGESTTADLNGHGTHVAGTVAALNNSIGVIGDAPSADLYAVKVLGANGRGSVSGIAQGLEWAATNNMHIANMSLGSDAPSTTLERAVNYATSRGVLVIAATGNNGTGSIGYPARYANAMAVGATDQNNRRASFSQYGTGIDIVAPGVGIQSTYLNNSYASMPGTSMATPHVAGVAALVKQKNPSWNATQIRNHLKNTATNLGNSSQFGSGLVNADAATR

SEQ ID NO: 67671 - protein, 268 aa, Unidentified
QTVPWGITRVQAPTVHNRGITGSGVKVAILDTGIAQHSDLTIRGGASFVPGESTTADLNGHGTHVAGTVAALNNRIGVIGVAPSADLYAVKVLGANGRGSVSGIAQGLEWAATNNMHIANMSLGSDAPSTTLERAVNYATSRGVLVIAATGNNGTGSIGYPARYANAMAVGATDQNNRRASFSQYGTGIDIVAPGVGIQSTYLNNSYASMPGTSMATPHVAGVAALVKQKNPSWNATQIRNHLKNTATNLGNSSQFGSGLVNADAATR

SEQ ID NO: 67672 - protein, 268 aa, Unidentified
QTVPWGITRVQAPTVHNRGITGSGVKVAILDTGIAQHSDLTIRGGAFFVPGESTTADLNGHGTHVAGTVAALNNSIGVIGVAPSADLYAVKVLGANGRGSVSGIAQGLEWAATNNMHIANMSLGSDAPSTTLERAVNYATSRGVLVIAATGNNGTGSIGYPARYANAMAVGATDQNNRRASFSQYGTGIDIVAPGVGIQSTYLNNSYASMPGTSMATPHVAGVAALVKQKNPSWNATQIRNHLKNTATNLGNSSQFGSGLVNADAATR

SEQ ID NO: 67673 - protein, 268 aa, Unidentified
QTVPWGITRVQAPTVHNRGITGSGVKVAILDTGIAQHSDLTIRGGAGFVPGESTTADLNGHGTHVAGTVAALNNSIGVIGVAPSADLYAVKVLGANGRGSVSGIAQGLEWAATNNMHIANMSLGSDAPSTTLERAVNYATSRGVLVIAATGNNGTGSIGYPARYANAMAVGATDQNNRRASFSQYGTGIDIVAPGVGIQSTYLNNSYASMPGTSMATPHVAGVAALVKQKNPSWNATQIRNHLKNTATNLGNSSQFGSGLVNADAATR

SEQ ID NO: 67674 - protein, 268 aa, Unidentified
QTVPWGITRVQAPTVHNRGITGSGVKVAILDTGIAQHEDLTIRGGASFVPGESTTADLNGHGTHVAGTVAALNNNIGVIGVAPSADLYAVKVLGANGRGSVSGIAQGLEWAATNNMHIANMSLGSDAPSTTLERAVNYATSRGVLVIAATGNNGTGSIQYPARYANAMAVGATDQNNRRASFSQYGTGIDIVAPGVGIQSTYLNNSYASMSGTSMATPHVAGVAALVKQKNPSWNATQIRNHLKNTATNLGNSSQFGSGLVNADAATR

SEQ ID NO: 67675 - protein, 268 aa, Unidentified
QVVPWGITRVQAPTVHNRGITGSGVKVAILDTGIAQHSDLTIRGGASFVPGESTTADLNGHGTHVAGTVAALNNNIGVIGVAPSADLYAVKVLGANGRGSVSGIAQGLEWAATNNMHIANMSLGSDAPSTTLERAVNYATSRGVLVIAATGNNGTGSIGYPARYANAMAVGATDQNNRRASFSQYGTGIDIVAPGVGIQSTYLNNSYASMPGTSMATPHVAGVAALVKQKNPSWNATQIRNHLKNTATNLGPSSQFGSGLVNADAATR

SEQ ID NO: 67676 - protein, 268 aa, Unidentified
QVVPWGIERVQAPTVHNRGITGSGVKVAILDTGIAQHEDLTIRGGASFVPGESTTADLNGHGTHVAGTVAALDNSIGVIGVAPSADLYAVKVLGANGRGSVSGIAQGLEWAATNNMHIANMSLGSDAPSTTLERAVNYATSRGVLVIAATGNNGTGSIGYPARYANAMAVGATDQNNRRASFSQYGTGIDIVAPGVGIQSTYLNNSYASMPGTSMATPHVAGVAALVKQKNPSWNATQIRNHLKNTATNLGNSSQFGSGLVNADAATR

SEQ ID NO: 67677 - protein, 268 aa, Unidentified
QTVPWGITRVQAPAVHNRGITGSGVRVAILDSGISTHEDLNVRGGVSFVPGETTYADLNGHGTHVAGTVAALNNSIGVVGVAPSADLYAVKVLGANGRGSVSGIAQGLEWAAQNNMHIANMSLGSEGPSSTLERAVNYATSRDVLVIAATGNNGSGSVGYPARYANAMAVGATDQNNRRANFSQYGTGIDIVAPGVNVQSTYPGNRYVSMNGTSMATPHVAGAAALVKQRYPSWNATQIRDHLKNTATNLGNSSQFGSGLVNAEAATR

SEQ ID NO: 67678 - protein, 268 aa, Unidentified
QTVPWGITRVQAPTVHNRGITGSGVKVAILDTGIAQHSDLTIRGGASFVPGESTTADLNGHGTHVAGTVAALNNEIGVIGVAPSADLYAVKVLGANGRGSVSGIAQGLEWAATNNMHIANMSLGSDAPSTTLERAVNYATSRGVLVIAATGNNGTGSIGYPARYANAMAVGATDQNNRRASFSQYGTGIDIVAPGVGIQSTYLNNSYASMPGTSMATPHVAGVAALVKQKNPSWNATQIRNHLKNTATNLGNSSQFGSGLVNADAATR

SEQ ID NO: 67679 - protein, 268 aa, Unidentified
QTVPWGITRVQAPTVHNRGITGSGVKVAILDTGIAQHEDLTIRGGASFVPGESTTADLNGHGTHVAGTVAALDNSIGVIGVAPSADLYAVKVLGANGRGSVSGIAQGLEWAATNNMHIANMSLGSDAPSTTLERAVNYATSRGVLVIAATGNNGTGSIGYPARYANAMAVGATDQNNRRASFSQYGTGIDIVAPGVGIQSTYLNNSYASMPGTSMATPHVAGVAALVKQKNPSWNATQIRNHLKNTATNLGPSSQFGSGLVNADAATR

SEQ ID NO: 67680 - protein, 268 aa, Unidentified
QVVPWGITRVQAPTVHNRGITGSGVKVAILDTGIAQHSDLTIRGGASFVPGESTTADLNGHGTHVAGTVAALNNNIGVIGVAPSADLYAVKVLGANGRGSVSGIAQGLEWAATNNMHIANMSLGSDAPSTTLERAVNYATSRGVLVIAATGNNGTGSIGYPARYANAMAVGATDQNNRRASFSQYGTGIDIVAPGVGIQSTYLNNSYASMSGTSMATPHVAGVAALVKQKNPSWNATQIRNHLKNTATNLGPSSQFGSGLVNADAATR

SEQ ID NO: 67681 - protein, 268 aa, Unidentified
QTVPWGIERVQAPTVHNRGITGSGVKVAILDTGIAQHSDLTIRGGASFVPGESTTADLNGHGTHVAGTVAALDNSIGVIGVAPSADLYAVKVLGANGRGSVSGIAQGLEWAATNNMHIANMSLGSDAPSTTLERAVNYATSRGVLVIAATGNNGTGSIGYPARYANAMAVGATDQNNQRASFSQYGTGIDIVAPGVGIQSTYLNNSYASMPGTSMATPHVAGVAALVKQKNPSWNATQIRNHLKNTATNLGNSSQFGSGLVNADAATR

SEQ ID NO: 67682 - protein, 268 aa, Unidentified
QTVPWGIERVQAPTVHNRGITGSGVKVAILDTGIAQHSDLTIRGGASFVPGESTTADLNGHGTHVAGTVAALNNNIGVIGVAPSADLYAVKVLGANGRGSVSGIAQGLEWAATNNMHIANMSLGSDAPSTTLERAVNYATSRGVLVIAATGNNGTGSIGYPARYANAMAVGATDQNNQRASFSQYGTGIDIVAPGVGIQSTYLNNSYASMSGTSMATPHVAGVAALVKQKNPSWNATQIRNHLKNTATNLGNSSQFGSGLVNADAATR

SEQ ID NO: 67683 - protein, 268 aa, Unidentified
QTVPWGIERVQAPTVHNRGITGSGVKVAILDTGIAQHEDLTIRGGASFVPGESTTADLNGHGTHVAGTVAALDNSIGVIGVAPSADLYAVKVLGANGRGSVSGIAQGLEWAATNNMHIANMSLGSDAPSTTLERAVNYATSRGVLVIAATGNNGTGSIGYPARYANAMAVGATDQNNRRASFSQYGTGIDIVAPGVGIQSTYLNNSYASMPGTSMATPHVAGVAALVKQKNPSWNATQIRNHLKNTATNLGNSSQFGSGLVNADAATR

SEQ ID NO: 67684 - protein, 268 aa, Unidentified
QTVPWGITRVLAPTVHNRGITGSGVKVAILDTGIAQHSDLTIRGGASFVPGESTTADLNGHGTHVAGTVAALNNSIGVIGVAPSADLYAVKVLGANGRGSVSGIAQGLEWAATNNMHIANMSLGSDAPSTTLERAVNYATSRGVLVIAATGNNGTGSIGYPARYANAMAVGATDQNNRRASFSQYGTGIDIVAPGVGIQSTYLNNSYASMPGTSMATPHVAGVAALVKQKNPSWNATQIRNHLKNTATNLGNSSQFGSGLVNADAATR

SEQ ID NO: 67685 - protein, 268 aa, Unidentified
QTVPWGITRVQAPTVHNRGITGSGVKVAILDTGIAQHSDLTIRGGASFVPGESTTADLNGHGTHVAGTVAALNNSIGVIGWAPSADLYAVKVLGANGRGSVSGIAQGLEWAATNNMHIANMSLGSDAPSTTLERAVNYATSRGVLVIAATGNNGTGSIGYPARYANAMAVGATDQNNRRASFSQYGTGIDIVAPGVGIQSTYLNNSYASMPGTSMATPHVAGVAALVKQKNPSWNATQIRNHLKNTATNLGNSSQFGSGLVNADAATR

SEQ ID NO: 67686 - protein, 268 aa, Unidentified
QTVPWGITRVQAPTVHNRGITGSGVKVAILDTGIAQHSDLTIRGGASFVPGESTTADLNGHGTHVAGTVAALNNSIGVIGVAPSADLQAVKVLGANGRGSVSGIAQGLEWAATNNMHIANMSLGSDAPSTTLERAVNYATSRGVLVIAATGNNGTGSIGYPARYANAMAVGATDQNNRRASFSQYGTGIDIVAPGVGIQSTYLNNSYASMPGTSMATPHVAGVAALVKQKNPSWNATQIRNHLKNTATNLGNSSQFGSGLVNADAATR

SEQ ID NO: 67687 - protein, 268 aa, Unidentified
QTVPWGITRVQAPAVHNRGITGSGVRVAILDSGISTHEDLNVRGGVSFVPGETTYADLNGHGTHVAGTVAALNNSIGVVGVAPSADLYAVKVLGANGRGSVSGIAQGLEWAAVNNMHIANMSLGAEGPSSTLERAVNYATSRDVLVIAATGNNGSGSVGYPARYANAMAVGATDQNNRRANFSQYGTGIDIVAPGVNVQSTYPGNRYVSMNGTSMATPHVAGAAALVKQRYPSWNATQIRNHLKNTATNLGNSSQFGSGLVNAEAATR

SEQ ID NO: 67688 - protein, 268 aa, Unidentified
QTVPWGITRVQAPTVHNRGITGSGVKVAILDTGIAQKSDLTIRGGASFVPGESTTADLNGHGTHVAGTVAALNNSIGVIGVAPSADLYAVKVLGANGRGSVSGIAQGLEWAATNNMHIANMSLGSDAPSTTLERAVNYATSRGVLVIAATGNNGTGSIGYPARYANAMAVGATDQNNRRASFSQYGTGIDIVAPGVGIQSTYLNNSYASMPGTSMATPHVAGVAALVKQKNPSWNATQIRNHLKNTATNLGNSSQFGSGLVNADAATR

SEQ ID NO: 67689 - protein, 268 aa, Unidentified
QTVPWGITRVQAPTVHNRGITGSGVKVAILDTGIAQHSDLTIRGGASFVPGESTTADLNGHGTHVAGTVAALNNSIGVIGVAPSADLYAVKVLGANGRGFVSGIAQGLEWAATNNMHIANMSLGSDAPSTTLERAVNYATSRGVLVIAATGNNGTGSIGYPARYANAMAVGATDQNNRRASFSQYGTGIDIVAPGVGIQSTYLNNSYASMPGTSMATPHVAGVAALVKQKNPSWNATQIRNHLKNTATNLGNSSQFGSGLVNADAATR

SEQ ID NO: 67690 - protein, 268 aa, Unidentified
QTVPWGITRVQAPTVHNRGITGSGVKVAILDTGIAQHSDLTIRGGASFVPGESTTADLNGHGTHVSGTVAALNNSIGVIGVAPSADLYAVKVLGANGRGSVSGIAQGLEWAATNNMHIANMSLGSDAPSTTLERAVNYATSRGVLVIAATGNNGTGSIGYPARYANAMAVGATDQNNRRASFSQYGTGIDIVAPGVGIQSTYLNNSYASMPGTSMATPHVAGVAALVKQKNPSWNATQIRNHLKNTATNLGNSSQFGSGLVNADAATR

SEQ ID NO: 67691 - protein, 268 aa, Unidentified
QTVPWGITRVQAPTVHNRGITGSGVKVAILDTGIAQHSDLTIRGGASFVPGESTTADLNGHGTHVAGTVAALNNSIGVIGVAPSADLYAVKVLGANGRGSVSGIAQGLEWAATNNMHIANMSLGSDAPSTTLERAVNYATSRGVLVIAATGNNGTGSIGYPARYANAMAVGATDQNNRRASFSQYGTGIDIVAPGVGIQSTYLNNSYASMPGTSMATPHVAGVAALVKQKNPSWNATQIRNHLKNTLTNLGNSSQFGSGLVNADAATR

SEQ ID NO: 67692 - protein, 268 aa, Unidentified
QTVPWGITRVQAPTVHNRGITGSGVKVAILDTGIAQHSDLTIRGGASFVPGESTTADLNGHGTHVAGTVAALNNSIGVIGVAPSADLYAVKVLGANGRGSVSGIAQGLEWAATNNMHIANMSLGSDAPSTTLERAVNYATSRGVLVIAATGNNGTGSIGYPARYANAMAVGATDQNNRRASFSQYGTGIDIVAPGVGIQSTYLNNSYASMPGTSMATPHVAGVAALVKQKNPSWNATQIRNHLKNTETNLGNSSQFGSGLVNADAATR

SEQ ID NO: 67693 - protein, 268 aa, Unidentified
QTVPWGITRVQAPTVHNRGITGSGVKVAILDTGIAQHSDLTIRGGASFVPGESTTADLNGHGTHVAGTVAALNNSIGVIGVAPSADLYAVKVLGANGRGHVSGIAQGLEWAATNNMHIANMSLGSDAPSTTLERAVNYATSRGVLVIAATGNNGTGSIGYPARYANAMAVGATDQNNRRASFSQYGTGIDIVAPGVGIQSTYLNNSYASMPGTSMATPHVAGVAALVKQKNPSWNATQIRNHLKNTATNLGNSSQFGSGLVNADAATR

SEQ ID NO: 67694 - protein, 268 aa, Unidentified
QTVPWGITRVQAPTVHNRGITGSGVKVAILDTGIAQHSDLTIRGGASFVPGESTTADLNGHGTHVAGTVAALNNFIGVIGVAPSADLYAVKVLGANGRGSVSGIAQGLEWAATNNMHIANMSLGSDAPSTTLERAVNYATSRGVLVIAATGNNGTGSIGYPARYANAMAVGATDQNNRRASFSQYGTGIDIVAPGVGIQSTYLNNSYASMPGTSMATPHVAGVAALVKQKNPSWNATQIRNHLKNTATNLGNSSQFGSGLVNADAATR

SEQ ID NO: 67695 - protein, 268 aa, Unidentified
QTVPWGITRVQAPTVHNRGITGSGVKVAILDTGIAQHSDLTIRGGASFVPGESTTADLNGHGTHVAGTVAALNNPIGVIGVAPSADLYAVKVLGANGRGSVSGIAQGLEWAATNNMHIANMSLGSDAPSTTLERAVNYATSRGVLVIAATGNNGTGSIGYPARYANAMAVGATDQNNRRASFSQYGTGIDIVAPGVGIQSTYLNNSYASMPGTSMATPHVAGVAALVKQKNPSWNATQIRNHLKNTATNLGNSSQFGSGLVNADAATR

SEQ ID NO: 67696 - protein, 268 aa, Unidentified
QTVPWGITRVQAPTVHNRGITGSGVKVAILDTGIAQHSDLTIRGGASFVPGESTTADLNGHGTHVAGTVAALNNSIGVIGVAPSADLMAVKVLGANGRGSVSGIAQGLEWAATNNMHIANMSLGSDAPSTTLERAVNYATSRGVLVIAATGNNGTGSIGYPARYANAMAVGATDQNNRRASFSQYGTGIDIVAPGVGIQSTYLNNSYASMPGTSMATPHVAGVAALVKQKNPSWNATQIRNHLKNTATNLGNSSQFGSGLVNADAATR

SEQ ID NO: 67697 - protein, 268 aa, Unidentified
QTVPWGITRVQAPTVHNRGITGSGVKVAILDTGIAQHSDLTIRGGASFVPGESTTADLNGHGTHVAGTVAALNNNIGVIGVAPSADLYAVKVLGANGRGSVSGIAQGLEWAATNNMHIANMSLGSDAPSTTLERAVNYATSRGVLVIAATGNNGTGSIGYPARYANAMAVGATDQNNQRASFSQYGTGIDIVAPGVGIQSTYLNNSYASMPGTSMATPHVAGVAALVKQKNPSWNATQIRNHLKNTATNLGPSSQFGSGLVNADAATR

SEQ ID NO: 67698 - protein, 268 aa, Unidentified
QTVPWGITRVQAPTVHNRGITGSGVKVAILDTGIAQHSDLTIRGGASFVPGESTTADLNGHGTHVAGTVAALNNSIGVIGLAPSADLYAVKVLGANGRGSVSGIAQGLEWAATNNMHIANMSLGSDAPSTTLERAVNYATSRGVLVIAATGNNGTGSIGYPARYANAMAVGATDQNNRRASFSQYGTGIDIVAPGVGIQSTYLNNSYASMPGTSMATPHVAGVAALVKQKNPSWNATQIRNHLKNTATNLGNSSQFGSGLVNADAATR

SEQ ID NO: 67699 - protein, 268 aa, Unidentified
QTVPWGITRVQAPTVHNRGITGSGVKVAILDTGIAQHSDLTIRGGASFVPGESTTADLNGHGTHVAGTVAALNNSIGVIGTAPSADLYAVKVLGANGRGSVSGIAQGLEWAATNNMHIANMSLGSDAPSTTLERAVNYATSRGVLVIAATGNNGTGSIGYPARYANAMAVGATDQNNRRASFSQYGTGIDIVAPGVGIQSTYLNNSYASMPGTSMATPHVAGVAALVKQKNPSWNATQIRNHLKNTATNLGNSSQFGSGLVNADAATR

SEQ ID NO: 67700 - protein, 268 aa, Unidentified
QTVPWGITRVQAPTVHNRGITGSGVKVAILDTGIAQHSDLTIRGGASFVPGESTTADLNGHGTHVAGTVAALNNSIGVIGVAPSADLWAVKVLGANGRGSVSGIAQGLEWAATNNMHIANMSLGSDAPSTTLERAVNYATSRGVLVIAATGNNGTGSIGYPARYANAMAVGATDQNNRRASFSQYGTGIDIVAPGVGIQSTYLNNSYASMPGTSMATPHVAGVAALVKQKNPSWNATQIRNHLKNTATNLGNSSQFGSGLVNADAATR

SEQ ID NO: 67701 - protein, 268 aa, Unidentified
QTVPWGITRVQAPTVHNRGITGSGVKVAILDTGIAQHEDLTIRGGASFVPGESTTADLNGHGTHVAGTVAALNNNIGVIGVAPSADLYAVKVLGANGRGSVSGIAQGLEWAATNNMHIANMSLGSDAPSTTLERAVNYATSRGVLVIAATGNNGTGSIGYPARYANAMAVGATDQNNRRASFSQYGTGIDIVAPGVGIQSTYLNNSYASMPGTSMATPHVAGVAALVKQKNPSWNATQIRNHLKNTATNLGPSSQFGSGLVNADAATR

SEQ ID NO: 67702 - protein, 268 aa, Unidentified
QTVPWGITRVQAPTVHNRGITGSGVKVAILDTGIAQHSDLTIRGGASFVPGESTTADLNGHGTHVSGTVAALNNSIGVIGVAPSADLYAVKVLGANGRGSVSGIAQGLEWAATNNMHIANMSLGSDAPSTTLERAVNYATSRGVLVIAATGNNGTGSIGYPARYANAMAVGATDQNNRRASFSQYGTGIDIVAPGVGIQSTYLNNSYASMPGTSMATPHVAGVAALVKQKNPSWNATQIRNHLKNTATNLGPSSQFGSGLVNADAATR

SEQ ID NO: 67703 - protein, 268 aa, Unidentified
QTVPWGITRVQAPTVHNRGITGSGVKVAILDTGIAQHSDLTIRGGASFVPGESTTADLNGHGTHVAGTVAALNNSIGVIGVAPSADLYAVKVLGANGRGQVSGIAQGLEWAATNNMHIANMSLGSDAPSTTLERAVNYATSRGVLVIAATGNNGTGSIGYPARYANAMAVGATDQNNRRASFSQYGTGIDIVAPGVGIQSTYLNNSYASMPGTSMATPHVAGVAALVKQKNPSWNATQIRNHLKNTATNLGNSSQFGSGLVNADAATR

SEQ ID NO: 67704 - protein, 268 aa, Unidentified
QTVPWGITRVQAPAVHNRGITGSGVRVAILDSGISTHEDLNVRGGVSFVPGEPTYADLNGHGTHVAGTVAALNNSIGVVGVAPSADLYAVKVLGANGRGSVSGIAQGLEWAAQNNIHIANLSLGAEGPSSTLERAVNYATSRDVLVIAATGNNGSGSVGYPARYANAMAVGATDQNNRRANFSQYGTGIDIVAPGVNVQSTYPGNRYVSMNGTSMATPHVAGAAALVKQRYPSWNATQIRDHLKNTATNLGNSSQFGSGLVNAEAATR

SEQ ID NO: 67705 - protein, 268 aa, Unidentified
QTVPWGITRVQAPTVHNRGITGSGVKVAILDTGIAQHSDLTIRGGASFVPGESTTADLNGHGTHVAGTVAALNNKIGVIGVAPSADLYAVKVLGANGRGSVSGIAQGLEWAATNNMHIANMSLGSDAPSTTLERAVNYATSRGVLVIAATGNNGTGSIGYPARYANAMAVGATDQNNRRASFSQYGTGIDIVAPGVGIQSTYLNNSYASMPGTSMATPHVAGVAALVKQKNPSWNATQIRNHLKNTATNLGNSSQFGSGLVNADAATR

SEQ ID NO: 67706 - protein, 268 aa, Unidentified
QTVPWGITRVQAPTVHNRGITGSGVKVAILDTGIAQHSDLTIRGGASFVPGESTTADLNGHGTHVAGTVAALNNSIGVIGVAPSADLYAVKVLGANGRGRVSGIAQGLEWAATNNMHIANMSLGSDAPSTTLERAVNYATSRGVLVIAATGNNGTGSIGYPARYANAMAVGATDQNNRRASFSQYGTGIDIVAPGVGIQSTYLNNSYASMPGTSMATPHVAGVAALVKQKNPSWNATQIRNHLKNTATNLGNSSQFGSGLVNADAATR

SEQ ID NO: 67707 - protein, 268 aa, Unidentified
QTVPWGITRVQAPTVHNRGITGSGVKVAILDTGIAQHSDLTIRGGASFVPGESTTADLNGHGTHVAGTVAALNNSIGVIGMAPSADLYAVKVLGANGRGSVSGIAQGLEWAATNNMHIANMSLGSDAPSTTLERAVNYATSRGVLVIAATGNNGTGSIGYPARYANAMAVGATDQNNRRASFSQYGTGIDIVAPGVGIQSTYLNNSYASMPGTSMATPHVAGVAALVKQKNPSWNATQIRNHLKNTATNLGNSSQFGSGLVNADAATR

SEQ ID NO: 67708 - protein, 268 aa, Unidentified
QTVPWGITRVQAPTVHNRGITGSGVKVAILDTGIAQHSDLTIRGGASFVPGESTTADLNGHGTHVAGTVAALNNSIGVIGVAPSADLVAVKVLGANGRGSVSGIAQGLEWAATNNMHIANMSLGSDAPSTTLERAVNYATSRGVLVIAATGNNGTGSIGYPARYANAMAVGATDQNNRRASFSQYGTGIDIVAPGVGIQSTYLNNSYASMPGTSMATPHVAGVAALVKQKNPSWNATQIRNHLKNTATNLGNSSQFGSGLVNADAATR

SEQ ID NO: 67709 - protein, 268 aa, Unidentified
QTVPWGITRVQAPTVHNRGITGSGVKVAILDTGIAQHSDLTIRGGASFVPGESTTADLNGHGTHVAGTVAALNNSIGVIGAAPSADLYAVKVLGANGRGSVSGIAQGLEWAATNNMHIANMSLGSDAPSTTLERAVNYATSRGVLVIAATGNNGTGSIGYPARYANAMAVGATDQNNRRASFSQYGTGIDIVAPGVGIQSTYLNNSYASMPGTSMATPHVAGVAALVKQKNPSWNATQIRNHLKNTATNLGNSSQFGSGLVNADAATR

SEQ ID NO: 67710 - protein, 268 aa, Unidentified
QVVPWGITRVQAPTVHNRGITGSGVKVAILDTGIAQHSDLTIRGGASFVPGESTTADLNGHGTHVAGTVAALNNNIGVIGVAPSADLYAVKVLGANGRGSVSGIAQGLEWAATNNMHIANMSLGSDAPSTTLERAVNYATSRGVLVIAATGNNGTGSIGYPARYANAMAVGATDQNNRRASFSQYGTGIDIVAPGVGIQSTYLNNSYASMSGTSMATPHVAGVAALVKQKNPSWNATQIRNHLKNTATNLGNSSQFGSGLVNADAATR

SEQ ID NO: 67711 - protein, 268 aa, Unidentified
QTVPWGITRVQAPTVHNRGITGSGVKVAILDTGIAQHSDLTIRGGASFVPGESTTADLNGHGTHVAGTVAALNNTIGVIGVAPSADLYAVKVLGANGRGSVSGIAQGLEWAATNNMHIANMSLGSDAPSTTLERAVNYATSRGVLVIAATGNNGTGSIGYPARYANAMAVGATDQNNRRASFSQYGTGIDIVAPGVGIQSTYLNNSYASMPGTSMATPHVAGVAALVKQKNPSWNATQIRNHLKNTATNLGNSSQFGSGLVNADAATR

SEQ ID NO: 67712 - protein, 268 aa, Unidentified
QVVPWGITRVQAPTVHNRGITGSGVKVAILDTGIAQHSDLTIRGGASFVPGESTTADLNGHGTHVAGTVAALNNNIGVIGVAPSADLYAVKVLGANGRGSVSGIAQGLEWAATNNMHIANMSLGSDAPSTTLERAVNYATSRGVLVIAATGNNGTGSIGYPARYANAMAVGATDQNNQRASFSQYGTGIDIVAPGVGIQSTYLNNSYASMPGTSMATPHVAGVAALVKQKNPSWNATQIRNHLKNTATNLGNSSQFGSGLVNADAATR

SEQ ID NO: 67713 - protein, 268 aa, Unidentified
QTVPWGITRVQAPTVHNRGITGSGVKVAILDTGIAQTSDLTIRGGASFVPGESTTADLNGHGTHVAGTVAALNNSIGVIGVAPSADLYAVKVLGANGRGSVSGIAQGLEWAATNNMHIANMSLGSDAPSTTLERAVNYATSRGVLVIAATGNNGTGSIGYPARYANAMAVGATDQNNRRASFSQYGTGIDIVAPGVGIQSTYLNNSYASMPGTSMATPHVAGVAALVKQKNPSWNATQIRNHLKNTATNLGNSSQFGSGLVNADAATR

SEQ ID NO: 67714 - protein, 268 aa, Unidentified
QTVPWGITRVQAPAVHNRGITGSGVRVAILDSGISTHEDLNVRGGVSFVPGETTYADLNGHGTHVAGTVAALNNSIGVVGVAPSADLYAVKVLGANGRGSVSGIAQGLEWAAQNGMHIANMSLGAEGPSSTLERAVNYATSRDVLVIAATGNNGSGSVGYPARYANAMAVGATDQNNRRANFSQYGTGIDIVAPGVNVQSTYPGNRYVSMNGTSMATPHVAGAAALVKQRYPSWNATQIRDHLKNTATNLGNSSQFGSGLVNAEAATR

SEQ ID NO: 67715 - protein, 268 aa, Unidentified
QTVPWGITRVQAPAVHNRGITGSGVRVAILDSGISTHEDLNVRGGVSFVPGEPTTADLNGHGTHVAGTVAALDNSIGVVGVAPSADLYAVKVLGANGRGSVSGIAQGLEWAAANNMHIANMSLGSDAPSSTLERAVNYATSRDVLVIAATGNNGSGSVGYPARYANAMAVGATDQNNRRANFSQYGTGIDIVAPGVNVQSTYPGNRYVSMSGTSMATPHVAGAAALVKQRYPSWNATQIRNHLLNTATNLGNSSQFGSGLVNAEAATR

SEQ ID NO: 67716 - protein, 268 aa, Unidentified
QTVPWGITRVQAPAVHNRGITGSGVRVAILDSGISTHEDLNVRGGVSFVPGETTYADLNGHGTHVAGTVAALNNSIGVVGVAPSADLYAVKVLGANGRGSVSGIAQGLEWAAQNNMHIANMSLGASSPSSTLERAVNYATSRDVLVIAATGNNGSGSVGYPARYANAMAVGATDQNNRRANFSQYGTGIDIVAPGVNVQSTYPGNRYVSMNGTSMATPHVAGAAALVKQRYPSWNATQIRDHLKNTATNLGNSSQFGSGLVNAEAATR

SEQ ID NO: 67717 - protein, 268 aa, Unidentified
QTVPWGITRVQAPTVHNRGITGSGVKVAILDTGIAQASDLTIRGGASFVPGESTTADLNGHGTHVAGTVAALNNSIGVIGVAPSADLYAVKVLGANGRGSVSGIAQGLEWAATNNMHIANMSLGSDAPSTTLERAVNYATSRGVLVIAATGNNGTGSIGYPARYANAMAVGATDQNNRRASFSQYGTGIDIVAPGVGIQSTYLNNSYASMPGTSMATPHVAGVAALVKQKNPSWNATQIRNHLKNTATNLGNSSQFGSGLVNADAATR

SEQ ID NO: 67718 - protein, 268 aa, Unidentified
QTVPWGITRVQAPTVHNRGITGSGVKVAILDTGIAQHSDLTIRGGASFVPGESTTADLNGHGTHVAGTVAALNNSIGVIGVAPSADLYAVKVLGANGRGSVSGIAQGLEWAATNNMHIANMSLGSDAPSTTLERAVNYATSRGVLVIAATGNNGTGSIGYPARYANAMAVGATDQNNRRASFSQYGTGIDIVAPGVGIQSTYLNNSYASMPGTSMATPHVAGVAALVKQKNPSWNATQIRNHLKNTDTNLGNSSQFGSGLVNADAATR

SEQ ID NO: 67719 - protein, 268 aa, Unidentified
QTVPWGITRVQAPTVHNRGITGSGVKVAILDTGIAQHSDLTIRGGASFVPGESTTADLNGHGTHVAGTVAALNNNIGVIGVAPSADLYAVKVLGANGRGSVSGIAQGLEWAATNNMHIANMSLGSDAPSTTLERAVNYATSRGVLVIAATGNNGTGSIGYPARYANAMAVGATDQNNRRASFSQYGTGIDIVAPGVGIQSTYLNNSYASMPGTSMATPHVAGVAALVKQKNPSWNATQIRNHLKNTATNLGNSSQFGSGLVNADAATR

SEQ ID NO: 67720 - protein, 268 aa, Unidentified
QTVPWGITRVQAPTVHNRGITGSGVKVAILDTGIAQHSDLTIRGGASFVPGESTTADLNGHGTHVAGTVAALNNNIGVIGVAPSADLYAVKVLGANGRGSVSGIAQGLEWAATNNMHIANMSLGSDAPSTTLERAVNYATSRGVLVIAATGNNGTGSIGYPARYANAMAVGATDQNNRRASFSQYGTGIDIVAPGVGIQSTYLNNSYASMSGTSMATPHVAGVAALVKQKNPSWNATQIRNHLKNTATNLGNSSQFGSGLVNADAATR

SEQ ID NO: 67721 - protein, 268 aa, Unidentified
QTVPWGITRVQAPTVHNRGITGSGVKVAILDTGIAQHSDLTIRGGASFVPGESTTADLNGHGTHVAGTVAALNNSIGVIGVAPSADLYAVKVLGANGRGSVSGIAQGLEWAATNNMHIANMSLGSDAMSTTLERAVNYATSRGVLVIAATGNNGTGSIGYPARYANAMAVGATDQNNRRASFSQYGTGIDIVAPGVGIQSTYLNNSYASMPGTSMATPHVAGVAALVKQKNPSWNATQIRNHLKNTATNLGNSSQFGSGLVNADAATR

SEQ ID NO: 67722 - protein, 268 aa, Unidentified
QTVPWGITRVQAPTVHNRGITGSGVKVAILDTGIAQHSDLTIRGGASFVPGESTTADLNGHGTHVAGTVAALNNSIGVIGVAPSADLYAVKVLGANGRGSVSGIAQGLEWAATNNMHIANMSLGSDAPRTTLERAVNYATSRGVLVIAATGNNGTGSIGYPARYANAMAVGATDQNNRRASFSQYGTGIDIVAPGVGIQSTYLNNSYASMPGTSMATPHVAGVAALVKQKNPSWNATQIRNHLKNTATNLGNSSQFGSGLVNADAATR

SEQ ID NO: 67723 - protein, 268 aa, Unidentified
QTVPWGITRVQAPTVHNRGITGSGVKVAILDTGIAQHEDLTIRGGASFVPGESTTADLNGHGTHVSGTVAALNNSIGVIGVAPSADLYAVKVLGANGRGSVSGIAQGLEWAATNNMHIANMSLGSDAPSTTLERAVNYATSRGVLVIAATGNNGTGSIQYPARYANAMAVGATDQNNRRASFSQYGTGIDIVAPGVGIQSTYLNNSYASMSGTSMATPHVAGVAALVKQKNPSWNATQIRNHLKNTATNLGNSSQFGSGLVNADAATR

SEQ ID NO: 67724 - protein, 268 aa, Unidentified
QTVPWGITRVQAPAVHNRGITGSGVRVAILDSGISTHEDLNVRGGVSFVPGEPTYADLNGHGTHVAGTVAALNNSIGVVGVAPSADLYAVKVLGANGTGSVSGIAQGLEWAAQNNMHIANMSLGGGVPSSTLERAVNYATSRDVLVIAATGNNGSGSVGYPARYANAMAVGATDQNNRRANFSQYGTGIDIVAPGVNVQSTYPGNRYVSMNGTSMATPHVAGAAALVKQRYPSWNATQIRDHLKNTATNLGNSSQFGSGLVNAEAATR

SEQ ID NO: 67725 - protein, 268 aa, Unidentified
QTVPWGITRVQAPAVHNRGITGSGVRVAILDSGISTHEDLNVRGGVSFVPGETTYADLNGHGTHVAGTVAALNNSIGVVGVAPSADLYAVKVLGANGRGSVSGIAQGLEWAAHNNMHIANMSLGAEGPSSTLERAVNYATSRDVLVIAATGNNGSGSVGYPARYANAMAVGATDQNNRRANFSQYGTGIDIVAPGVNVQSTYPGNRYVSMNGTSMATPHVAGAAALVKQRYPSWNATQIRNHLKNTATNLGNSSQFGSGLVNAEAATR

SEQ ID NO: 67726 - protein, 268 aa, Unidentified
QTVPWGITRVQAPTVHNRGITGSGVKVAILDTGIAQHSDLTIRGGASFVPGESTTADLNGHGTHVAGTVAALNNSIGVIGVAPSADLYAVKVLGANGRGSVSGIAQGLEWAATNNMHIANMSLGSDAISTTLERAVNYATSRGVLVIAATGNNGTGSIGYPARYANAMAVGATDQNNRRASFSQYGTGIDIVAPGVGIQSTYLNNSYASMPGTSMATPHVAGVAALVKQKNPSWNATQIRNHLKNTATNLGNSSQFGSGLVNADAATR

SEQ ID NO: 67727 - protein, 268 aa, Unidentified
QTVPWGITRVQAPTVHNRGITGSGVKVAILDTGIAQHEDLTIRGGASFVPGESTTADLNGHGTHVSGTVAALNNSIGVIGVAPSADLYAVKVLGANGRGSVSGIAQGLEWAATNNMHIANMSLGSDAPSTTLERAVNYATSRGVLVIAATGNNGTGSIGYPARYANAMAVGATDQNNQRASFSQYGTGIDIVAPGVGIQSTYLNNSYASMPGTSMATPHVAGVAALVKQKNPSWNATQIRNHLKNTATNLGNSSQFGSGLVNADAATR

SEQ ID NO: 67728 - protein, 268 aa, Unidentified
QTVPWGITRVQAPTVHNRGITGSGVKVAILDTGIAQHSDLTIRGGASFVPGESTTADLNGHGTHVAGTVAALNNSIGVIGVAPSADLYAVKVLGANGRGSVSGIAQGLEWAATNNMHIANMSLGSDAPSTTLERAVNYATSRGVLVIAATGNNGTGSIGYPARYANAMAVGATDQNNRRASFSQYGTGIDIVAPGVGIQSTYLNNSYASMPGTSMATPHVAGVAALVKQKNPSWNATQIRNHLKNTKTNLGNSSQFGSGLVNADAATR

SEQ ID NO: 67729 - protein, 268 aa, Unidentified
QVVPWGIERVQAPTVHNRGITGSGVKVAILDTGIAQHSDLTIRGGASFVPGESTTADLNGHGTHVAGTVAALNNNIGVIGVAPSADLYAVKVLGANGRGSVSGIAQGLEWAATNNMHIANMSLGSDAPSTTLERAVNYATSRGVLVIAATGNNGTGSIGYPARYANAMAVGATDQNNRRASFSQYGTGIDIVAPGVGIQSTYLNNSYASMPGTSMATPHVAGVAALVKQKNPSWNATQIRNHLKNTATNLGNSSQFGSGLVNADAATR

SEQ ID NO: 67730 - protein, 268 aa, Unidentified
QTVPWGITRVQAPTVHNRGITGSGVKVAILDTGIAQHSDLTIRGGASFVPGESTTAGLNGHGTHVAGTVAALNNSIGVIGVAPSADLYAVKVLGANGRGSVSGIAQGLEWAATNNMHIANMSLGSDAPSTTLERAVNYATSRGVLVIAATGNNGTGSIGYPARYANAMAVGATDQNNRRASFSQYGTGIDIVAPGVGIQSTYLNNSYASMPGTSMATPHVAGVAALVKQKNPSWNATQIRNHLKNTATNLGNSSQFGSGLVNADAATR

SEQ ID NO: 67731 - protein, 268 aa, Unidentified
QTVPWGITRVQAPTVHNRGVTGSGVKVAILDTGIAQHSDLTIRGGASFVPGESTTADLNGHGTHVAGTVAALNNSIGVIGVAPSADLYAVKVLGANGRGSVSGIAQGLEWAATNNMHIANLSLGSDAPSTTLERAVNYATSRGVLVIAATGNNGTGSIGYPARYANAMAVGATDQNNRRASFSQYGTGIDIVAPGVGIQSTYLNNSYASMPGTSMATPHVSGVAALVKQKNPSWNATQIRNHLKNNATNLGNSSQFGSGLVNADAATR

SEQ ID NO: 67732 - protein, 268 aa, Unidentified
QTVPWGITRVQAPAVHNRGITGSGVRVAILDSGISTHEDLNVRGGVSFVPGETTTADLNGHGTHVAGTVAALNNSIGVVGVAPSADLYAVKVLGANGRGSVSGIAQGLEWAATNNMHIANMSLGAEGPSSTLERAVNYATSRDVLVIAATGNNGSGSVGYPARYANAMAVGATDQNNRRANFSQYGTGIDIVAPGVNVQSTYPGNRYVSMNGTSMATPHVAGAAALVKQRYPSWNATQIRDHLKNTATNLGNSSQFGSGLVNAEAATR

SEQ ID NO: 67733 - protein, 268 aa, Unidentified
QTVPWGITRVQAPTVHNRGITGSGVKVAILDTGIAQHSDLTIRGGASFVPGESTTADLNGHGTHVAGTVAALNNSIGVIGGAPSADLYAVKVLGANGRGSVSGIAQGLEWAATNNMHIANMSLGSDAPSTTLERAVNYATSRGVLVIAATGNNGTGSIGYPARYANAMAVGATDQNNRRASFSQYGTGIDIVAPGVGIQSTYLNNSYASMPGTSMATPHVAGVAALVKQKNPSWNATQIRNHLKNTATNLGNSSQFGSGLVNADAATR

SEQ ID NO: 67734 - protein, 268 aa, Unidentified
QTVPWGITRVQAPAVHNRGITGSGVRVAILDSGISTHEDLNIRGGVSFVPGETTYADLNGHGTHVAGTVAALNNSIGVVGVAPSADLYAVKVLGANGRGSVSGIAQGLEWAATNNMHIANMSLGAEGPSSTLERAVNYATSRDVLVIAATGNNGSGSVGYPARYANAMAVGATDQNNRRANFSQYGTGIDIVAPGVNVQSTYPGNRYVSMNGTSMATPHVAGAAALVKQRYPSWNATQIRDHLKNTATNLGNSSQFGSGLVNAEAATR

SEQ ID NO: 67735 - protein, 268 aa, Unidentified
QTVPWGITRVQAPTVHNRGITGSGVKVAILDTGIAQHSDLTIRGGASFVPGESTTADLNGHGTHVAGTVAALNNIIGVIGVAPSADLYAVKVLGANGRGSVSGIAQGLEWAATNNMHIANMSLGSDAPSTTLERAVNYATSRGVLVIAATGNNGTGSIGYPARYANAMAVGATDQNNRRASFSQYGTGIDIVAPGVGIQSTYLNNSYASMPGTSMATPHVAGVAALVKQKNPSWNATQIRNHLKNTATNLGNSSQFGSGLVNADAATR

SEQ ID NO: 67736 - protein, 268 aa, Unidentified
QTVPWGITRVLAPTVHNRGVTGSGVKVAILDTGIAQHSDLTIRGGASFVPGESTTADLNGHGTHVAGTVAALNNSIGVIGVAPSADLYAVKVLGANGRGSVSGIAQGLEWAATNNMHIANLSLGSDAPSTTLERAVNYATSRGVLVIAATGNNGTGSIGYPARYANAMAVGATDQNNRRASFSQYGTGIDIVAPGVGIQSTYLNNSYASMPGTSMATPHVSGVAALVKQKNPSWNATQIRNHLKNTATNLGNSSQFGSGLVNADAATR

SEQ ID NO: 67737 - protein, 268 aa, Unidentified
QVVPWGITRVQAPTVHNRGITGSGVKVAILDTGIAQHSDLTIRGGASFVPGESTTADLNGHGTHVAGTVAALDNSIGVIGVAPSADLYAVKVLGANGRGSVSGIAQGLEWAATNNMHIANMSLGSDAPSTTLERAVNYATSRGVLVIAATGNNGTGSIGYPARYANAMAVGATDQNNRRASFSQYGTGIDIVAPGVGIQSTYLNNSYASMPGTSMATPHVAGVAALVKQKNPSWNATQIRNHLKNTATNLGNSSQFGSGLVNADAATR

SEQ ID NO: 67738 - protein, 268 aa, Unidentified
QTVPWGITRVQAPTVHNRGITGSGVKVAILDTGIAQHSDLTIRGGASFVPGESTTADLNGHGTHVAGTVAALNNSIGVIGVAPSADLYAVKVLGANGRGSVSGIAQGLEWAATNNMHIANMSLGSDAPSTTLERAVNYATSRGVLVIAATGNNGTGSIGYPARYANAMAVGATDQNNRRASFSQYGTGIDIVAPGVGIQSTYLNNSYASMPGTSMATPHVAGVAALVKQKNPSWNATQIRNHLKNTQTNLGNSSQFGSGLVNADAATR

SEQ ID NO: 67739 - protein, 268 aa, Unidentified
QTVPWGITRVQAPAVHNRGITGSGVRVAILDSGISTHEDLNVRGGVSFVPGEPTYADLNGHGTHVAGTVAALNNSIGVIGVAPNAELYAVKVLGANGRGSVSGIAQGLEWAATNNMHIANMSLGAEGPSSTLERAVNYATSRDVLVIAATGNNGSGSVGYPARYANAMAVGATDQNNRRANFSQYGTGIDIVAPGVNVLSTYPGNRYVSMNGTSMATPHVAGAAALVKQRYPSWNATQIRNHLKNTATNLGNSSQFGSGLVNAEAATR

SEQ ID NO: 67740 - protein, 268 aa, Unidentified
QTVPWGITRVQAPTVHNRGITGSGVKVAILDTGIAQHSQLTIRGGASFVPGESTTADLNGHGTHVAGTVAALNNSIGVIGVAPSADLYAVKVLGANGRGSVSGIAQGLEWAATNNMHIANMSLGSDAPSTTLERAVNYATSRGVLVIAATGNNGTGSIGYPARYANAMAVGATDQNNRRASFSQYGTGIDIVAPGVGIQSTYLNNSYASMPGTSMATPHVAGVAALVKQKNPSWNATQIRNHLKNTATNLGNSSQFGSGLVNADAATR

SEQ ID NO: 67741 - protein, 268 aa, Unidentified
QTVPWGITRVQAPAVHNRGITSGGVRVAILDSGISTHEDLNVRGGVSFVPGEPTYADLNGHGTHVAGTVAALNNSIGVVGVAPSADLYAVKVLGANGSGSVSGIAQGLEWAAQNNMHIANMSLGTGVPSSTLERAVNYATSRDVLVIAATGNNGSGSVGYPARYANAMAVGATDQNNRRANFSQYGTGIDIVAPGVNVQSTYPGNRYVSMNGTSMATPHVAGAAALVKQRYPSWNATQIRNHLKNTATNLGNSSQFGSGLVNAEAATR

SEQ ID NO: 67742 - protein, 268 aa, Unidentified
QTVPWGITRVQAPTVHNRGITGSGVKVAILDTGIAQHSDLTIRGGASFVPGESTTADLNGHGTHVAGTVAALNNNIGVIGVAPSADLYAVKVLGANGRGSVSGIAQGLEWAATNNMHIANMSLGSDAPSTTLERAVNYATSRGVLVIAATGNNGTGSIGYPARYANAMAVGATDQNNRRASFSQYGTGIDIVAPGVGIQSTYLNNSYASMSGTSMATPHVAGVAALVKQKNPSWNATQIRNHLKNTATNLGPSSQFGSGLVNADAATR

SEQ ID NO: 67743 - protein, 268 aa, Unidentified
QTVPWGIERVQAPTVHNRGITGSGVKVAILDTGIAQHSDLTIRGGASFVPGESTTADLNGHGTHVSGTVAALNNSIGVIGVAPSADLYAVKVLGANGRGSVSGIAQGLEWAATNNMHIANMSLGSDAPSTTLERAVNYATSRGVLVIAATGNNGTGSIGYPARYANAMAVGATDQNNRRASFSQYGTGIDIVAPGVGIQSTYLNNSYASMPGTSMATPHVAGVAALVKQKNPSWNATQIRNHLKNTATNLGPSSQFGSGLVNADAATR

SEQ ID NO: 67744 - protein, 268 aa, Unidentified
QTVPWGITRVQAPTVHNRGITGSGVKVAILDTGIAQISDLTIRGGASFVPGESTTADLNGHGTHVAGTVAALNNSIGVIGVAPSADLYAVKVLGANGRGSVSGIAQGLEWAATNNMHIANMSLGSDAPSTTLERAVNYATSRGVLVIAATGNNGTGSIGYPARYANAMAVGATDQNNRRASFSQYGTGIDIVAPGVGIQSTYLNNSYASMPGTSMATPHVAGVAALVKQKNPSWNATQIRNHLKNTATNLGNSSQFGSGLVNADAATR

SEQ ID NO: 67745 - protein, 268 aa, Unidentified
QTVPWGITRVQAPTVHNRGITGSGVKVAILDTGIAQHSDLTIRGGASFVPGESTTADLNGHGTHVSGTVAALNNSIGVIGVAPSADLYAVKVLGANGRGSVSGIAQGLEWAATNNMHIANMSLGSDAPSTTLERAVNYATSRGVLVIAATGNNGTGSIGYPARYANAMAVGATDQNNRRASFSQYGTGIDIVAPGVGIQSTYLNNSYASMSGTSMATPHVAGVAALVKQKNPSWNATQIRNHLKNTATNLGNSSQFGSGLVNADAATR

SEQ ID NO: 67746 - protein, 268 aa, Unidentified
QTVPWGITRVQAPAVHNRGITGSGVRVAILDSGISTHEDLNVRGGVSFVPGEPTYADLNGHGTHVAGTVAALNNSIGVVGVAPSADLYAVKVLGANGRGSVSGIAQGLEWAAQNNMHIANMSLGMLEPSSTLERAVNYATSRDVLVIAATGNNGSGSVGYPARYANAMAVGATDQNNRRANFSQYGTGIDIVAPGVNVQSTYPGNRYVSMNGTSMATPHVAGAAALVKQRYPSWNATQIRDHLKNTATNLGNSSQFGSGLVNAEAATR

SEQ ID NO: 67747 - protein, 268 aa, Bacillus gibsonii
QTVPWGITRVQAPAVHNRGITGSGVRVAILDSGISTHEDLNVRGGVSFVPGETTYADLNGHGTHVAGTVAALNNSIGVVGVAPSADLYAVKVLGANGEGSVSGIAQGLEWAAQNNMHIANMSLGSDFPSSTLERAVNYATSRDVLVIAATGNNGSGSVGYPARYANAMAVGATDQNNRRANFSQYGTGIDIVAPGVNVQSTYPGNRYVSMNGTSMATPHVAGAAALVKQRYPSWNATQIRDHLKNTATNLGNSSQFGSGLVNAEAATR

SEQ ID NO: 67748 - protein, 268 aa, Unidentified
QTVPWGITRVQAPTVHNRGITGSGVKVAILDTGIAQHSDLTIRGGASFVPGESTTAALNGHGTHVAGTVAALNNSIGVIGVAPSADLYAVKVLGANGRGSVSGIAQGLEWAATNNMHIANMSLGSDAPSTTLERAVNYATSRGVLVIAATGNNGTGSIGYPARYANAMAVGATDQNNRRASFSQYGTGIDIVAPGVGIQSTYLNNSYASMPGTSMATPHVAGVAALVKQKNPSWNATQIRNHLKNTATNLGNSSQFGSGLVNADAATR

SEQ ID NO: 67749 - protein, 268 aa, Unidentified
QTVPWGITRVQAPTVHNRGITGSGVKVAILDTGIAQHSDLTIRGGASFVPGESTTALLNGHGTHVAGTVAALNNSIGVIGVAPSADLYAVKVLGANGRGSVSGIAQGLEWAATNNMHIANMSLGSDAPSTTLERAVNYATSRGVLVIAATGNNGTGSIGYPARYANAMAVGATDQNNRRASFSQYGTGIDIVAPGVGIQSTYLNNSYASMPGTSMATPHVAGVAALVKQKNPSWNATQIRNHLKNTATNLGNSSQFGSGLVNADAATR

SEQ ID NO: 67750 - protein, 268 aa, Unidentified
QTVPWGITRVQAPTVHNRGITGSGVKVAILDTGIAQHSDLTIRGGASFVPGESTTADLNGHGTHVSGTVAALNNSIGVIGVAPSADLYAVKVLGANGRGSVSGIAQGLEWAATNNMHIANMSLGSDAPSTTLERAVNYATSRGVLVIAATGNNGTGSIQYPARYANAMAVGATDQNNRRASFSQYGTGIDIVAPGVGIQSTYLNNSYASMSGTSMATPHVAGVAALVKQKNPSWNATQIRNHLKNTATNLGNSSQFGSGLVNADAATR

SEQ ID NO: 67751 - protein, 268 aa, Unidentified
QTVPWGITRVQAPTVHNRGITGSGVKVAILDTGIAQHSDLTIRGGASFVPGESTTADLNGHGTHVAGTVAALNNNIGVIGVAPSADLYAVKVLGANGRGSVSGIAQGLEWAATNNMHIANMSLGSDAPSTTLERAVNYATSRGVLVIAATGNNGTGSIQYPARYANAMAVGATDQNNRRASFSQYGTGIDIVAPGVGIQSTYLNNSYASMSGTSMATPHVAGVAALVKQKNPSWNATQIRNHLKNTATNLGNSSQFGSGLVNADAATR

SEQ ID NO: 67752 - protein, 268 aa, Unidentified
QTVPWGITRVQAPTVHNRGITGSGVKVAILDTGIAQHSDLTIRGGALFVPGESTTADLNGHGTHVAGTVAALNNSIGVIGVAPSADLYAVKVLGANGRGSVSGIAQGLEWAATNNMHIANMSLGSDAPSTTLERAVNYATSRGVLVIAATGNNGTGSIGYPARYANAMAVGATDQNNRRASFSQYGTGIDIVAPGVGIQSTYLNNSYASMPGTSMATPHVAGVAALVKQKNPSWNATQIRNHLKNTATNLGNSSQFGSGLVNADAATR

SEQ ID NO: 67753 - protein, 268 aa, Unidentified
QTVPWGITRVQAPAVHNRGLTGSGVRVAILDSGISTHEDLNVRGGVSFVPGETTYADLNGHGTHVAGTVAALNNSIGVVGVAPSADLYAVKVLGANGRGSVSGIAQGLEWAAQNNMHIANMSLGAEGPSSTLERAVNYATSRDVLVIAATGNNGSGSVGYPARYANAMAVGATDQNNRRANFSQYGTGIDIVAPGVNVQSTYPGNRYVSMNGTSMATPHVAGAAALVKQRYPSWNATQIRDHLKNTATNLGNSSQFGSGLVNAEAATR

SEQ ID NO: 67754 - protein, 268 aa, Unidentified
QTVPWGITRVQAPTVHNRGITGSGVKVAILDTGIAQGSDLTIRGGASFVPGESTTADLNGHGTHVAGTVAALNNSIGVIGVAPSADLYAVKVLGANGRGSVSGIAQGLEWAATNNMHIANMSLGSDAPSTTLERAVNYATSRGVLVIAATGNNGTGSIGYPARYANAMAVGATDQNNRRASFSQYGTGIDIVAPGVGIQSTYLNNSYASMPGTSMATPHVAGVAALVKQKNPSWNATQIRNHLKNTATNLGNSSQFGSGLVNADAATR

SEQ ID NO: 67755 - protein, 268 aa, Unidentified
QTVPWGITRVQAPTVHNRGITGSGVKVAILDTGIAQHSDLTIRGGASFVPGESTTADLNGHGTHVSGTVAALNNSIGVIGVAPSADLYAVKVLGANGRGSVSGIAQGLEWAATNNMHIANMSLGSDAPSTTLERAVNYATSRGVLVIAATGNNGTGSIGYPARYANAMAVGATDQNNQRASFSQYGTGIDIVAPGVGIQSTYLNNSYASMSGTSMATPHVAGVAALVKQKNPSWNATQIRNHLKNTATNLGNSSQFGSGLVNADAATR

SEQ ID NO: 67756 - protein, 268 aa, Unidentified
QTVPWGITRVQAPTVHNRGITGSGVKVAILDTGIAQHSDLTIRGGASFVPGESTTADLNGHGTHVAGTVAALNNSIGVIGVAPSADLYAVKVLGANGRGSVSGIAQGLEWAATNNMHIANMSLGSDANSTTLERAVNYATSRGVLVIAATGNNGTGSIGYPARYANAMAVGATDQNNRRASFSQYGTGIDIVAPGVGIQSTYLNNSYASMPGTSMATPHVAGVAALVKQKNPSWNATQIRNHLKNTATNLGNSSQFGSGLVNADAATR

SEQ ID NO: 67757 - protein, 268 aa, Unidentified
QTVPWGITRVQAPTVHNRGITGSGVKVAILDTGIAQHSDLTIRGGAMFVPGESTTADLNGHGTHVAGTVAALNNSIGVIGVAPSADLYAVKVLGANGRGSVSGIAQGLEWAATNNMHIANMSLGSDAPSTTLERAVNYATSRGVLVIAATGNNGTGSIGYPARYANAMAVGATDQNNRRASFSQYGTGIDIVAPGVGIQSTYLNNSYASMPGTSMATPHVAGVAALVKQKNPSWNATQIRNHLKNTATNLGNSSQFGSGLVNADAATR

SEQ ID NO: 67758 - protein, 268 aa, Unidentified
QTVPWGITRVQAPAVHNRGITGSGVRVAILDSGISTHEDLNVRGGVSFVPGETTYADLNGHGTHVAGTVAALNNSIGVVGVAPSADLYAVKVLGANGMGSVSGIAQGLEWAAQNNMHIANMSLGAEGPSSTLERAVNYATSRDVLVIAATGNNGSGSVGYPARYANAMAVGATDQNNRRANFSQYGTGIDIVAPGVNVQSTYPGNRYVSMNGTSMATPHVAGAAALVKQRYPSWNATQIRNHLKNTATNLGNSSQFGSGLVNAEAATR

SEQ ID NO: 67759 - protein, 268 aa, Unidentified
QTVPWGITRVQAPTVHNRGITGSGVKVAILDTGIAQHSDLTIRGGASFVPGESTTAELNGHGTHVAGTVAALNNSIGVIGVAPSADLYAVKVLGANGRGSVSGIAQGLEWAATNNMHIANMSLGSDAPSTTLERAVNYATSRGVLVIAATGNNGTGSIGYPARYANAMAVGATDQNNRRASFSQYGTGIDIVAPGVGIQSTYLNNSYASMPGTSMATPHVAGVAALVKQKNPSWNATQIRNHLKNTATNLGNSSQFGSGLVNADAATR

SEQ ID NO: 67760 - protein, 268 aa, Unidentified
QTVPWGITRVQAPTVHNRGITGSGVKVAILDTGIAQHSDLTIRGGASFVPGESTTASLNGHGTHVAGTVAALNNSIGVIGVAPSADLYAVKVLGANGRGSVSGIAQGLEWAATNNMHIANMSLGSDAPSTTLERAVNYATSRGVLVIAATGNNGTGSIGYPARYANAMAVGATDQNNRRASFSQYGTGIDIVAPGVGIQSTYLNNSYASMPGTSMATPHVAGVAALVKQKNPSWNATQIRNHLKNTATNLGNSSQFGSGLVNADAATR

SEQ ID NO: 67761 - protein, 268 aa, Unidentified
QTVPWGITRVQAPTVHNRGITGSGVKVAILDTGIAQHEDLTIRGGASFVPGESTTADLNGHGTHVAGTVAALNNNIGVIGVAPSADLYAVKVLGANGRGSVSGIAQGLEWAATNNMHIANMSLGSDAPSTTLERAVNYATSRGVLVIAATGNNGTGSIGYPARYANAMAVGATDQNNQRASFSQYGTGIDIVAPGVGIQSTYLNNSYASMPGTSMATPHVAGVAALVKQKNPSWNATQIRNHLKNTATNLGNSSQFGSGLVNADAATR

SEQ ID NO: 67762 - protein, 267 aa, Unidentified
QTVPWGITRVQAPAVHNRGITGSGVRVAILDSGISAHEDLNVRGGVSFVPGEPTTADLNGHGTHVAGTVAALNNSIGVVGVAPADLYAVKVLGANGRGSVSGIAQGLEWAAANNMHIANMSLGSDAPSSTLERAVNYATSRDVLVIAATGNNGSGSVGYPARYANAMAVGATDQNNRRANFSQYGTGIDIVAPGVNVQSTYPGNRYVSMNGTSMATPHVAGVAALVKQRYPSWNATQIRDHLKSTATNLGNSNQFGSGLVNAEAATR

SEQ ID NO: 67763 - protein, 341 aa, Unidentified
EKVINSIEDIISGAGEEEYGQLKSSKLRNKTLEAYSLLNILELEIYKTRLQKLLNQEVYYCQIESIEEMEYEGWVYDFEVSKYHNFVANNIICHNSGVKVAVLDTGISTHPDLNIRGGASFVPGEPSTQDGNGHGTHVAGTIAALNNSIGVLGVAPSAELYAVKVLGASGSGSVSSIAQGLEWAGNNGMHVANLSLGSPSPSATLEQAVNSATSRGVLVVAASGNSGAGSISYPARYANAMAVGATDQNNNRASFSQYGAGLDIVAPGVNVQSTYPGSTYASLNGTSMATPHVAGAAALVKQKNPSWSNVQIRNHLKNTATSLGSTNLYGSGLVNAEAATR

SEQ ID NO: 67764 - protein, 275 aa, Bacillus sp.
AQTVPYGIPQIKAPAVHAQGYKGANVKVAVLDTGIHAAHPDLNVAGGASFVPSEPNATQDFQSHGTHVAGTIAALDNTIGVLGVAPSASLYAVKVLDRYGDGQYSWIISGIEWAVANNMDVINMSLGGPSGSTALKNAVDTANNRGVVVVAAAGNSGSSGSSSTVGYPAKYDSTIAVANVNSNNVRNSSSSAGPELDVSAPGTSILSTVPSSGYTSLNGTSMASPHVAGAAALILSKHPNLSASQVRNRLSSTATYLGSSFYYGKGLINVEAAAQ

SEQ ID NO: 67765 - protein, 268 aa, Unidentified
QTVPWGIERVQAPTVHNRGITGSGVKVAILDTGIAQHSDLTIRGGASFVPGESTTADLNGHGTHVSGTVAALNNNIGVIGVAPSADLYAVKVLGANGRGSVSGIAQGLEWAATNNMHIANMSLGSDAPSTTLERAVNYATSRGVLVIAATGNNGTGSIGYPARYANAMAVGATDQNNRRASFSQYGTGIDIVAPGVGIQSTYLNNSYASMPGTSMATPHVAGVAALVKQKNPSWNATQIRNHLKNTATNLGNSSQFGSGLVNADAATR

SEQ ID NO: 67766 - protein, 268 aa, Unidentified
QTVPWGITRVQAPAVHNRGITGSGVRVAILDSGISAHEDLNVRGGVSFVPGEPTTADLNGHGTHVAGTVAALNNSIGVVGVAPSADLYAVKVLGANGRGSVSGIAQGLEWAAANNMHIANMSLGSDAPSSTLERAVNYATSQDVLVIAATGNNGSGSVGYPARYANAMAVGATDQNNRRANFSQYGTGIDIVAPGVNVQSTYPGNRYVSMNGTSMATPHVAGAAALVKQRYPSWNATQIRDHLKKTATNLGNSSQFGSGLVNAEAATR

SEQ ID NO: 67767 - protein, 268 aa, Unidentified
QTVPWGITRVQAPAVHNRGITGSGVRVAILDSGISTHEDLNVRGGDSFVPGETTYADLNGHGTHVAGTVAALDNSIGVVGVAPSADLYAVKVLGANGRGSVSGIAQGLEWAAQNNMHIANMSLGAEGPSSTLERAVNYATSRDVLVIAATGNNGSGSVGYPARYANAMAVGATDQNNRRANFSQYGTGIDIVAPGVNVQSTYPGNRYVSMNGTSMATPHVAGAAALVKQRYPSWNATQIRNHLKNTATNLGNSSQFGSGLVNAEAATR

SEQ ID NO: 67768 - protein, 268 aa, Unidentified
QTVPWGITRVQAPAVHNRGITGSGVRVAILDSGISTHEDLNVRGGVSFVPGETTYADLNGHGTHVAGTVAALNNSIGVVGVAPSADLYAVKVLGANGRGSVSGIAQGLEWAAQNNMHIANMSLGTGGPSSTLERAVNYATSRDVLVIAATGNNGSGSVGYPARYANAMAVGATDQNNRRANFSQYGTGIDIVAPGVNVQSTYPGNRYVSMNGTSMATPHVAGAAALVKQRYPSWNATQIRDHLKNTATNLGNSSQFGSGLVNAEAATR

SEQ ID NO: 67769 - protein, 268 aa, Unidentified
QTVPWGITRVQAPTVHNRGITGSGVKVAILDTGIAQHEDLTIRGGASFVPGESTTADLNGHGTHVAGTVAALDNNIGVIGVAPSADLYAVKVLGANGRGSVSGIAQGLEWAATNNMHIANMSLGSDAPSTTLERAVNYATSRGVLVIAATGNNGTGSIGYPARYANAMAVGATDQNNQRASFSQYGTGIDIVAPGVGIQSTYLNNSYASMPGTSMATPHVAGVAALVKQKNPSWNATQIRNHLKNTATNLGNSSQFGSGLVNADAATR

SEQ ID NO: 67770 - protein, 268 aa, Unidentified
QTVPWGITRVQAPAVHNRGITGSGVRVAILDSGIAAHEDLNVRGGVSFVPGEPTTADLNGHGTHVAGTVAALNNSIGVVGVAPSADLYAVKVLGANGRGSVSGIAQGLEWAAANNMHIASMSLGSDAPSSTLERAVNYATSQDVLVIAATGNNGSGSVGYPARYANAMAVGATDQNNRRANFSQYGTGIDIVAPGVNVQSTYPGNRYVSMNGTSMATPHVAGAAALVKQRYPSWNATQIRNHLKNTATNLGNSSQFGSGLVNAEAATR

SEQ ID NO: 67771 - protein, 268 aa, Unidentified
QTVPWGITRVQAPAVHNRGITGSGVRVAILDSGISTHEDLNVRGGVSFVPGETTYADLNGHGTHVAGTVAALENSIGVVGVAPSADLYAVKVLGANGRGSVSGIAQGLEWAAQNNMHIANMSLGAEGPSSTLERAVNYATSRDVLVIAATGNNGSGSVGYPARYANAMAVGATDQNNRRANFSQYGTGIDIVAPGVNVQSTYPGNRYVSMNGTSMATPHVAGAAALVKQRYPSWNATQIRNHLKNTATNLGNSSQFGSGLVNAEAATR

SEQ ID NO: 67772 - protein, 268 aa, Unidentified
QTVPWGITRVQAPAVHNRGITGSGVRVAILDSGISTHEDLNVRGGVSFVPGETTYADLNGHGTHVAGTVAALNNSIGVVGVAPSADLYAVKVLGANGRGSVSGIAQGLEWAAQNNMHIANMSLGIEGPSSTLERAVNYATSRDVLVIAATGNNGSGSVGYPARYANAMAVGATDQNNRRANFSQYGTGIDIVAPGVNVQSTYPGNRYVSMNGTSMATPHVAGAAALVKQRYPSWNATQIRDHLKNTATNLGNSSQFGSGLVNAEAATR

SEQ ID NO: 67773 - protein, 268 aa, Unidentified
QTVPWGITRVQAPAVHNRGITGSGVRVAILDSGISTHEDLNVRGGVSFVPGETTYADLNGHGTHVAGTVAALNNSIGVVGVAPSADLYAVKVLGANGRGSVSGIAQGLEWAAQNNMHIANMSLGAEGPSSTLEYAVNYATSRDVLVIAATGNNGSGSVGYPARYANAMAVGATDQNNRRANFSQYGTGIDIVAPGVNVQSTYPGNRYVSMNGTSMATPHVAGAAALVKQRYPSWNATQIRDHLKNTATNLGNSSQFGSGLVNAEAATR

SEQ ID NO: 67774 - protein, 268 aa, Unidentified
QTVPWGITRVQAPAVHNRGITGSGVRVAILDSGISTHEDLNVRGGVSFVPGEPGYADLNGHGTHVAGTVAALDNSIGVVGVAPSADLYAVKVLGANGRGSISGIAQGLEWAAQNNMHIANMSLGTDAPSSTLERAVNYATSRDVLVIAATGNNGSGSVGYPARYANAMAVGATDQNNRRANFSQYGTGIDIVAPGVNVQSTYPGNRYVSMNGTSMATPHVAGAAALVKQRYPSWNATQIRNHLKNTATNLGNSSQFGSGLVNAEAATR

SEQ ID NO: 67775 - protein, 268 aa, Unidentified
QTVPWGITRVQAPAVHNRGITGSGVRVAILDSGISTHEDLNVRGGVSFVPGETTYADLNGHGTHVAGTVAALNNSIGVVGVAPSADLYAVKVLGANGRGSVSGIAQGLEWAAQNNMHIANMSLGAEGPSDTLERAVNYATSRDVLVIAATGNNGSGSVGYPARYANAMAVGATDQNNRRANFSQYGTGIDIVAPGVNVQSTYPGNRYVSMNGTSMATPHVAGAAALVKQRYPSWNATQIRDHLKNTATNLGNSSQFGSGLVNAEAATR

SEQ ID NO: 67776 - protein, 268 aa, Unidentified
QTVPWGITRVQAPTVHNRGITGSGVKVAILDTGIAQHSDLTIRGGASFVPGESTTADLNGHGTHVSGTVAALDNSIGVIGVAPSADLYAVKVLGANGRGSVSGIAQGLEWAATNNMHIANMSLGSDAPSTTLERAVNYATSRGVLVIAATGNNGTGSIGYPARYANAMAVGATDQNNRRASFSQYGTGIDIVAPGVGIQSTYLNNSYASMPGTSMATPHVAGVAALVKQKNPSWNATQIRNHLKNTATNLGPSSQFGSGLVNADAATR

SEQ ID NO: 67777 - protein, 268 aa, Unidentified
QTVPWGITRVQAPAVHNRGITGSGVRVAILDSGISTHEDLNVRGGVSFVPGETTYADLNGHGTHVAGTVAALNNSIGVVGVAPSADLYAVKVLGANGRGSVSGIAQGLEWAAQNNMHIANMSLGLDAPSSTLERAVNYATSRDVLVIAATGNNGSGSVGYPARYANAMAVGATDQNNRRANFSQYGTGIDIVAPGVNVQSTYPGNRYVSMNGTSMATPHVAGAAALVKQRYPSWNATQIRDHLKNTATNLGNSSQFGSGLVNAEAATR

SEQ ID NO: 67778 - protein, 268 aa, Unidentified
QTVPWGITRVQAPAVHNRGITGSGVRVAILDSGISTHEDLNVRGGVSFVPGETTYADLNGHGTHVAGTVAALNNSIGVVGVAPSADLYAVKVLGANGRGSVSGIAQGLEWAAQNNMHIANMSLGAEFPSSTLERAVNYATSRDVLVIAATGNNGSGSVGYPARYANAMAVGATDQNNRRANFSQYGTGIDIVAPGVNVQSTYPGNRYVSMNGTSMATPHVAGAAALVKQRYPSWNATQIRDHLKNTATNLGNSSQFGSGLVNAEAATR

SEQ ID NO: 67779 - protein, 268 aa, Unidentified
QTVPWGITRVQAPAVHNRGITGSGVRVAILDSGISAHEDLNVRGGVSFVPGEPTTADLNGHGTHVAGTVAALNNSIGVVGVAPSADLYAVKVLGANGRGSVSGIAQGLEWAAANNMHIANMSLGSDAPSSTLERAVNYATSRDVLVIAATGNNGSGSVGYPARYANAMAVGATDQNNRRANFSQYGTGIDIVAPGVNVQSTYPGNRYVSMSGTSMATPHVAGAAALVKQRYPSWNATQIRNHLLSTATNLGNSSQFGSGLVNAEAATR

SEQ ID NO: 67780 - protein, 268 aa, Unidentified
QTVPWGITRVQAPAVHNRGITGSGVRVAILDSGISTHEDLNVRGGVSFVPGETTYADLNGHGTHVAGTVAALNNSIGVVGVAPSADLYAVKVLGANGRGSVSGIAQGLEWAAQNNMHIANMSLGAEGPSSTLEDAVNYATSRDVLVIAATGNNGSGSVGYPARYANAMAVGATDQNNRRANFSQYGTGIDIVAPGVNVQSTYPGNRYVSMNGTSMATPHVAGAAALVKQRYPSWNATQIRDHLKNTATNLGNSSQFGSGLVNAEAATR

SEQ ID NO: 67781 - protein, 268 aa, Bacillus gibsonii
QTVPWGITRVQAPAVHNRGITGSGVRVAILDSGISTHEDLNVRGGVSFVPGETTYADLNGHGTHVAGTVAALNNSIGVVGVAPSADLYAVKVLGANGRGSVSGIAQGLEWAAQNNMHIANMSLGTDEPSSTLERAVNYATSRDVLVIAATGNNGSGSVGYPARYANAMAVGATDQNNRRANFSQYGTGIDIVAPGVNVQSTYPGNRYVSMNGTSMATPHVAGAAALVKQRYPSWNATQIRDHLKNTATNLGNSSQFGSGLVNAEAATR

SEQ ID NO: 67782 - protein, 268 aa, Unidentified
QTVPWGITRVQAPAVHNRGITGSGVRVAILDSGISTHEDLNVRGGVSFVPGETTYADLNGHGTHVAGTVAALNNSIGVVGVAPTADLYAVKVLGANGRGSVSGIAQGLEWAAQNNMHIANMSLGAEGPSSTLERAVNYATSRDVLVIAATGNNGSGSVGYPARYANAMAVGATDQNNRRANFSQYGTGIDIVAPGVNVQSTYPGNRYVSMNGTSMATPHVAGAAALVKQRYPSWNATQIRNHLKNTATNLGNSSQFGSGLVNAEAATR

SEQ ID NO: 67783 - protein, 268 aa, Unidentified
QTVPWGITRVQAPAVHNRGITGSGVRVAILDSGISTHEDLNVRGGVSFVPGETTYADLNGHGTHVAGTVAALCNSIGVVGVAPSADLYAVKVLGANGRGSVSGIAQGLEWAAQNNMHIANMSLGAEGPSSTLERAVNYATSRDVLVIAATGNNGSGSVGYPARYANAMAVGATDQNNRRANFSQYGTGIDIVAPGVNVQSTYPGNRYVSMNGTSMATPHVAGAAALVKQRYPSWNATQIRNHLKNTATNLGNSSQFGSGLVNAEAATR

SEQ ID NO: 67784 - protein, 268 aa, Unidentified
QTVPWGITRVQAPAVHNRGITGSGVRVAILDSGISTHEDLNVRGGVSFVPGEPTTADLNGHGTHVAGTVAALDNSIGVVGVAPSADLYAVKVLGANGRGSISGIAQGLEWAAANNMHIANMSLGSDAPSSTLERAVNYATSQDVLVIAATGNNGSGTVGYPARYANAMAVGATDQNNRRANFSQYGTGIDIVAPGVNVQSTYPGNRYVSMNGTSMATPHVAGVAALVKQRYPSWNATQIRNHLKNTATNLGNSNQFGSGLVNAEAATR

SEQ ID NO: 67785 - protein, 268 aa, Unidentified
QTVPWGITRVQAPAVHNRGITGSGVRVAILDSGISTHEDLNVRGGVSFVPGETTYADLNGHGTHVAGTVAALNNSIGVVGVAPSADLYAVKVLGANGRGSVSGIAQGLEWAAQNNMHIANMSLGAEGPSSTLERAVNYATSRDVLVIAATGNNGSSSVGYPARYANAMAVGATDQNNRRANFSQYGTGIDIVAPGVNVQSTYPGNRYVSMNGTSMATPHVAGAAALVKQRYPSWNATQIRNHLKNTATNLGNSSQFGSGLVNAEAATR

SEQ ID NO: 67786 - protein, 268 aa, Unidentified
QTVPWGITRVQAPAVHNRGITGSGVRVAILDSGISTHEDLNVRGGVSFVPGETTYADLNGHGTHVAGTVAALNNSIGVVGVAPSADLYAVKVLGANGRGSVSGIAQGLEWAAQNEMHIANMSLGAEGPSSTLERAVNYATSRDVLVIAATGNNGSGSVGYPARYANAMAVGATDQNNRRANFSQYGTGIDIVAPGVNVQSTYPGNRYVSMNGTSMATPHVAGAAALVKQRYPSWNATQIRDHLKNTATNLGNSSQFGSGLVNAEAATR

SEQ ID NO: 67787 - protein, 268 aa, Unidentified
QTVPWGITRVQAPAVHNRGITGSGVRVAILDSGISTHEDLNIRGGVSFVPGEPTTADLNGHGTHVAGTVAALDNSIGVVGVAPSADLYAVKVLGANGRGSISGIAQGLEWAAQNNMHIANMSLGTDAPSSTLERAVNYATSRDVLVIAATGNNGSGTVGYPARYANAMAVGATDQNNRRANFSQYGTGIDIVAPGVNVQSTYPGNRYVSMNGTSMATPHVAGAAALVKQRYPSWNATQIRDHLKNTATNLGNSSQFGSGLVNAEAATR

SEQ ID NO: 67788 - protein, 268 aa, Unidentified
QTVPWGITRVQAPAVHNRGITGSGVRVAILDSGISTHEDLNVRGGVSFVPGETTYADLNGHGTHVAGTVAALNNSIGVVGVAPSADLYAVKVLGANGRGSVSGIAQGLEWAAQNNMHIANMSLGAEGPSSTLEAAVNYATSRDVLVIAATGNNGSGSVGYPARYANAMAVGATDQNNRRANFSQYGTGIDIVAPGVNVQSTYPGNRYVSMNGTSMATPHVAGAAALVKQRYPSWNATQIRDHLKNTATNLGNSSQFGSGLVNAEAATR

SEQ ID NO: 67789 - protein, 268 aa, Unidentified
QTVPWGITRVQAPAVHNRGITGSGVRVAILDSGISTHEDLNVRGGVSFVPGETTSADLNGHGTHVAGTVAALDNSIGVVGVAPSADLYAVKVLGANGRGSVSGIAQGLEWAAQNNMHIANMSLGAEGPSSTLERAVNYATSRDVLVIAATGNNGSGSVGYPARYANAMAVGATDQNNRRANFSQYGTGIDIVAPGVNVQSTYPGNRYVSMNGTSMATPHVAGAAALVKQRYPSWNATQIRNHLKNTATNLGNSSQFGSGLVNAEAATR

SEQ ID NO: 67790 - protein, 268 aa, Unidentified
QTVPWGITRVQAPAVHNRGITGSGVRVAILDSGISTHEDLNVRGGVSFVPGETTYADLNGHGTHVAGTVAALNNSIGVVGVAPSADLYAVKVLGANGRGSVSGIAQGLEWAAQNNMHIANMSLGAEGPSSTLERAVNYATSRDVLVIAATGNNGSGSVGYPARYANAMAVGATDQNNRRANFSQYGTGIDIVAPGVNVQSTYPGNRYVSNNGTSMATPHVAGAAALVKQRYPSWNATQIRDHLKNTATNLGNSSQFGSGLVNAEAATR

SEQ ID NO: 67791 - protein, 268 aa, Unidentified
QTVPWGITRVQAPAVHNRGITGSGVRVAILDSGISTHEDLNVRGGVSFVPGETTYADLNGHGTHVAGTVAALNNSIGVVGVAPSATLYAVKVLGANGRGSVSGIAQGLEWAAQNNMHIANMSLGAEGPSSTLERAVNYATSRDVLVIAATGNNGSGSVGYPARYANAMAVGATDQNNRRANFSQYGTGIDIVAPGVNVQSTYPGNRYVSMNGTSMATPHVAGAAALVKQRYPSWNATQIRDHLKNTATNLGNSSQFGSGLVNAEAATR

SEQ ID NO: 67792 - protein, 268 aa, Unidentified
QTVPWGITRVQAPAVHNRGITGSGVRVAILDSGISTHEDLNVRGGVSFVPGEPTTADLNGHGTHVAGTVAALDNSIGVVGVAPNAELYAVKVLGANGRGSISGIAQGLEWAAQNNMHIANMSLGTDAPSSTLERAVNYATSRDVLVIAATGNNGSGSVGYPARYANAMAVGATDQNNRRANFSQYGTGIDIVAPGVNVQSTYPGNRYVSMNGTSMATPHVAGAAALVKQRYPSWNATQIRDHLKNTATNLGNSSQFGSGLVNAEAATR

SEQ ID NO: 67793 - protein, 268 aa, Unidentified
QTVPWGITRVQAPTVHNRGITGSGVKVAILDTGIAQHSDLTIRGGASFVPGESTTADLNGHGTHVSGTVAALNNNIGVIGVAPSADLYAVKVLGANGRGSVSGIAQGLEWAATNNMHIANMSLGSDAPSTTLERAVNYATSRGVLVIAATGNNGTGSIGYPARYANAMAVGATDQNNQRASFSQYGTGIDIVAPGVGIQSTYLNNSYASMPGTSMATPHVAGVAALVKQKNPSWNATQIRNHLKNTATNLGNSSQFGSGLVNADAATR

SEQ ID NO: 67794 - protein, 268 aa, Unidentified
QTVPWGITRVQAPAVHNRGITGSGVRVAILDSGISTHEDLNVRGGVSFVPGETTYADLNGHGTHVAGTVAALNNSIGVVGVAPSADLYAVKVLGANGRGSVSGIAQGLEWAAMNNMHIANMSLGAEGPSSTLERAVNYATSRDVLVIAATGNNGSGSVGYPARYANAMAVGATDQNNRRANFSQYGTGIDIVAPGVNVQSTYPGNRYVSMNGTSMATPHVAGAAALVKQRYPSWNATQIRDHLKNTATNLGNSSQFGSGLVNAEAATR

SEQ ID NO: 67795 - protein, 268 aa, Unidentified
QTVPWGITRVQAPAVHNRGITGSGVRVAILDSGISTHEDLNVRGGVSFVPGETTYADLNGHGTHVAGTVAALNNSIGVVGVAPSADLYAVKVLGANGRGSVSGIAQGLEWAAQNNMHIANMSLGAEGPSSTLERAVNYATSRDVLVIAATGNNGEGSVGYPARYANAMAVGATDQNNRRANFSQYGTGIDIVAPGVNVQSTYPGNRYVSMNGTSMATPHVAGAAALVKQRYPSWNATQIRDHLKNTATNLGNSSQFGSGLVNAEAATR

SEQ ID NO: 67796 - protein, 268 aa, Unidentified
QTVPWGITRVQAPTVHNRGITGSGVKVAILDTGIAQHSDLTIRGGASFVPGESTTADLNGHGTHVAGTVAALDNNIGVIGVAPSADLYAVKVLGANGRGSVSGIAQGLEWAATNNMHIANMSLGSDAPSTTLERAVNYATSRGVLVIAATGNNGTGSIQYPARYANAMAVGATDQNNQRASFSQYGTGIDIVAPGVGIQSTYLNNSYASMPGTSMATPHVAGVAALVKQKNPSWNATQIRNHLKNTATNLGNSSQFGSGLVNADAATR

SEQ ID NO: 67797 - protein, 268 aa, Unidentified
QTVPWGITRVQAPAVHNRGITGSGVRVAILDSGISTHEDLNVRGGVSFVPGETTYADLNGHGTHVAGTVAALNNSIGVVGVAPSADLYAVKVLGANGRGSVSGIAQGLEWAAQNNMHIANMSLGAENPSSTLERAVNYATSRDVLVIAATGNNGSGSVGYPARYANAMAVGATDQNNRRANFSQYGTGIDIVAPGVNVQSTYPGNRYVSMNGTSMATPHVAGAAALVKQRYPSWNATQIRDHLKNTATNLGNSSQFGSGLVNAEAATR

SEQ ID NO: 67798 - protein, 268 aa, Unidentified
QTVPWGITRVQAPTVHNRGVTGSGVKVAILDTGIAQHSDLTIRGGASFVPGESTTADLNGHGTHVAGTVAALNNSIGVIGVAPSADLYAVKVLGANGRGSVSGIAQGLEWAATNNMHIANMSLGSDAPSTTLERAVNYATSRGVLVIAATGNNGTGSIGYPARYANAMAVGATDQVNRRASFSQYGTGIDIVAPGVGIQSTYLNNSYASMPGTSMATPHVAGVAALIKQKNPSWNATQIRNHLKNTATNLGNSSQFGSGLVNADAATR

SEQ ID NO: 67799 - protein, 268 aa, Unidentified
QTVPWGITRVQAPAVHNRGITGSGVRVAILDSGISTHEDLNVRGGVSFVPGEPTTADLNGHGTHVAGTVAALDNSIGVVGVAPSADLYAVKVLGANGRGSISGIAQGLEWAAANNMHIASMSLGSDAPSSTLERAVNYATSQDVLVIAATGNNGSGSVGYPARYANAMAVGATDQNNRRANFSQYGTGIDIVAPGVNVQSTYPGNRYVSMNGTSMATPHVAGAAALVKQRYPSWNATQIRNHLKNTATNLGNSSQFGSGLVNAEAATR

SEQ ID NO: 67800 - protein, 268 aa, Unidentified
QTVPWGITRVQAPTVHNRGITGSGVKVAILDTGIAQHSDLTIRGGASFVPGESTTADLNGHGTHVSGTVAALNNNIGVIGVAPSADLYAVKVLGANGRGSVSGIAQGLEWAATNNMHIANMSLGSDAPSTTLERAVNYATSRGVLVIAATGNNGTGSIGYPARYANAMAVGATDQNNQRASFSQYGTGIDIVAPGVGIQSTYLNNSYASMSGTSMATPHVAGVAALVKQKNPSWNATQIRNHLKNTATNLGNSSQFGSGLVNADAATR

SEQ ID NO: 67801 - protein, 268 aa, Unidentified
QTVPWGITRVQAPAVHNRGITGSGVRVAILDSGISTHEDLTVSGGVSFVPGEPTTADLNGHGTHVAGTVAALNNSIGVVGVAPSADLYAVKVLGANGRGSVSGIAQGLEWAAANNMHIANMSLGTDAPSSTLERAVNYATSRDVLVIAATGNNGSGSVGYPARYANAMAVGATDQNNRRANFSQYGTGIDIVAPGVNVQSTYPGNRYVSMNGTSMATPHVAGAAALVKQRYPSWNATQIRDHLKNTATNLGNSSQFGSGLVNAEAATR

SEQ ID NO: 67802 - protein, 268 aa, Unidentified
QTVPWGITRVQAPAVHNRGITGSGVRVAILDSGISTHEDLNVRGGVSFVPGETTNADLNGHGTHVAGTVAALDNSIGVVGVAPSADLYAVKVLGANGRGSVSGIAQGLEWAAQNNMHIANMSLGAEGPSSTLERAVNYATSRDVLVIAATGNNGSGSVGYPARYANAMAVGATDQNNRRANFSQYGTGIDIVAPGVNVQSTYPGNRYVSMNGTSMATPHVAGAAALVKQRYPSWNATQIRNHLKNTATNLGNSSQFGSGLVNAEAATR

SEQ ID NO: 67803 - protein, 268 aa, Unidentified
QTVPWGITRVQAPAVHNRGITGSGVRVAILDSGISTHEDLNVRGGVSFVPGETTYADLNGHGTHVAGTVAALNNSIGVVGVAPSADLYAVKVLGANGRGSVSGIAQGLEWAAQNNMHIANMSLGADGPSSTLERAVNYATSRDVLVIAATGNNGSGSVGYPARYANAMAVGATDQNNRRANFSQYGTGIDIVAPGVNVQSTYPGNRYVSMNGTSMATPHVAGAAALVKQRYPSWNATQIRDHLKNTATNLGNSSQFGSGLVNAEAATR

SEQ ID NO: 67804 - protein, 268 aa, Unidentified
QTVPWGITRVQAPAVHNRGITGSGVRVAILDSGISTHEDLNVRGGVSFVPGETTDADLNGHGTHVAGTVAALDNSIGVVGVAPSADLYAVKVLGANGRGSVSGIAQGLEWAAQNNMHIANMSLGAEGPSSTLERAVNYATSRDVLVIAATGNNGSGSVGYPARYANAMAVGATDQNNRRANFSQYGTGIDIVAPGVNVQSTYPGNRYVSMNGTSMATPHVAGAAALVKQRYPSWNATQIRNHLKNTATNLGNSSQFGSGLVNAEAATR

SEQ ID NO: 67805 - protein, 268 aa, Unidentified
QTVPWGITRVQAPAVHNRGITGSGVRVAILDSGISTHEDLNVRGGVSFVPGETTYADLNGHGTHVAGTVAALNNSIGVVGVAPSADLYAVKVLGANGRGSVSGIAQGLEWAAQNNMHIANMSLGQADPSSTLERAVNYATSRDVLVIAATGNNGSGSVGYPARYANAMAVGATDQNNRRANFSQYGTGIDIVAPGVNVQSTYPGNRYVSMNGTSMATPHVAGAAALVKQRYPSWNATQIRDHLKNTATNLGNSSQFGSGLVNAEAATR

SEQ ID NO: 67806 - protein, 268 aa, Bacillus gibsonii
QTVPWGITRVQAPTVHNRGITGSGVKVAILDTGIAQHSDLTIRGGASFVPGESTTADLNGHGTHVAGTVAALNNSIGVIGVAPSADLYAVKVLGAFGLGTISGIAQGLEWAATNNMHIANMSLGSDAPSTTLERAVNYATSRGVLVIAATGNNGTGSIGYPARYANAMAVGATDQNNRRASFSQYGTGIDIVAPGVGIQSTYLNNSYKSLDGTSMATPHVAGVAALVKQKNPSWNATQIRNHLKNTATNLGNSSQFGSGLVNADAATR

SEQ ID NO: 67807 - protein, 268 aa, Unidentified
QTVPWGITRVQAPAVHNRGITGSGVRVAILDSGISTHEDLNVRGGVSFVPGETTYADLNGHGTHVAGTVAALNNSIGVVGVAPSADLYAVKVLGANGRGSVSGIAQGLEWAAQNNMHIANMSLGVATPSSTLERAVNYATSRDVLVIAATGNNGSGSVGYPARYANAMAVGATDQNNRRANFSQYGTGIDIVAPGVNVQSTYPGNRYVSMNGTSMATPHVAGAAALVKQRYPSWNATQIRDHLKNTATNLGNSSQFGSGLVNAEAATR

SEQ ID NO: 67808 - protein, 268 aa, Unidentified
QTVPWGITRVQAPAVHNRGITGSGVRVAILDSGISTHEDLNVRGGVSFVPGETTYADLNGHGTHVAGTVAALNNSIGVVGVAPSADLYAVKVLGANGRGSVSGIAQGLEWAAQNNMHIANMSLGTDAPSSTLERAVNYATSRDVLVIAATGNNGSGSVGYPARYANAMAVGATDQNNRRANFSQYGTGIDIVAPGVNVQSTYPGNRYVSMNGTSMATPHVAGAAALVKQRYPSWNATQIRDHLKNTATNLGNSSQFGSGLVNAEAATR

SEQ ID NO: 67809 - protein, 268 aa, Unidentified
QTVPWGITRVQAPAVHNRGITGSGVRVAILDSGISTHEDLNVRGGVSFVPGETTYADLNGHGTHVAGTVAALNNSIGVVGVAPSADLYAVKVLGANGRGSVSGIAQGLEWAATNNMHIANMSLGAEFPSSTLERAVNYATSRDVLVIAATGNNGSGSVGYPARYANAMAVGATDQNNRRANFSQYGTGIDIVAPGVNVQSTYPGNRYVSMNGTSMATPHVAGAAALVKQRYPSWNATQIRDHLKNTATNLGNSSQFGSGLVNAEAATR

SEQ ID NO: 67810 - protein, 268 aa, Unidentified
QTVPWGITRVQAPAVHNRGITGSGVRVAILDSGISTHEDLNVRGGVSFVPGETTYADLNGHGTHVAGTVAALNNSIGVVGVAPSADLYAVKVLGANGLGSVSGIAQGLEWAAQNNMHIANMSLGAEGPSSTLERAVNYATSRDVLVIAATGNNGSGSVGYPARYANAMAVGATDQNNRRANFSQYGTGIDIVAPGVNVQSTYPGNRYVSMNGTSMATPHVAGAAALVKQRYPSWNATQIRDHLKNTATNLGNSSQFGSGLVNAEAATR

SEQ ID NO: 67811 - protein, 268 aa, Unidentified
QTVPWGITRVQAPAVHNRGITGSGVRVAILDSGISTHEDLNVRGGVSFVPGETTYADLNGHGTHVAGTVAALNNSIGVVGVAPSADLYAVKVLGANGRGSVSGIAQGLEWAAQNNMHIANCSLGAEGPSSTLERAVNYATSRDVLVIAATGNNGSGSVGYPARYANAMAVGATDQNNRRANFSQYGTGIDIVAPGVNVQSTYPGNRYVSMNGTSMATPHVAGAAALVKQRYPSWNATQIRDHLKNTATNLGNSSQFGSGLVNAEAATR

SEQ ID NO: 67812 - protein, 268 aa, Unidentified
QTVPWGITRVQAPTVHNRGITGSGVKVAILDTGIAQHSDLTIRGGASFVPGESTTADLNGHGTHVAGTVAALDNNIGVIGVAPSADLYAVKVLGANGRGSVSGIAQGLEWAATNNMHIANMSLGSDAPSTTLERAVNYATSRGVLVIAATGNNGTGSIGYPARYANAMAVGATDQNNRRASFSQYGTGIDIVAPGVGIQSTYLNNSYASMSGTSMATPHVAGVAALVKQKNPSWNATQIRNHLKNTATNLGNSSQFGSGLVNADAATR

SEQ ID NO: 67813 - protein, 268 aa, Unidentified
QTVPWGITRVQAPAVHNRGITGSGVRVAILDSGISAHEDLNIRGGVSFVPGEPTYADLNGHGTHVAGTVAALNNSIGVIGVAPNADLYAVKVLGANGRGSVSGIAQGLEWAAQNNMHIANMSLGTDAPSSTLERAVNYATSRDVLVIAATGNNGSGSVGYPARYANAMAVGATDQNNRRANFSQYGTGIDIVAPGVNVQSTYPGNRYVSMNGTSMATPHVAGAAALVKQRYPSWNATQIRDHLKNTATNLGNSSQFGSGLVNAEAATR

SEQ ID NO: 67814 - protein, 268 aa, Unidentified
QTVPWGITRVQAPAVHNRGITGSGVRVAILDSGISTHEDLNVRGGVSFVPGETTFADLNGHGTHVAGTVAALDNSIGVVGVAPSADLYAVKVLGANGRGSVSGIAQGLEWAAQNNMHIANMSLGAEGPSSTLERAVNYATSRDVLVIAATGNNGSGSVGYPARYANAMAVGATDQNNRRANFSQYGTGIDIVAPGVNVQSTYPGNRYVSMNGTSMATPHVAGAAALVKQRYPSWNATQIRNHLKNTATNLGNSSQFGSGLVNAEAATR

SEQ ID NO: 67815 - protein, 268 aa, Unidentified
QTVPWGITRVQAPAVHNRGITGSGVRVAILDSGISTHEDLNVRGGVSFVPGESTYQDLNGHGTHVAGTVAALDNSIGVVGVAPSADLYAVKVLGANGRGSVSGIAQGLEWAAANNMHIASMSLGSDAPSSTLERAVNYATSRDVLVIAATGNNGSGTVGYPARYANAMAVGATDQNNRRANFSQYGTGIDIVAPGVNVQSTYPGNRYVSMNGTSMATPHVAGVAALVKQRYPSWNATQIRNHLKNTATNLGNSNQFGSGLVNAEAATR

SEQ ID NO: 67816 - protein, 268 aa, Unidentified
QTVPWGITRVQAPAVHNRGITGSGVRVAILDSGISTHEDLNVRGGVSFVPGETTYADLNGHGTHVAGTVAALNNSIGVVGVAPSADLYAVKVLGANGRGSVSGIAQGLEWAAQNNMHIANMSLGIETPSSTLERAVNYATSRDVLVIAATGNNGSGSVGYPARYANAMAVGATDQNNRRANFSQYGTGIDIVAPGVNVQSTYPGNRYVSMNGTSMATPHVAGAAALVKQRYPSWNATQIRDHLKNTATNLGNSSQFGSGLVNAEAATR

SEQ ID NO: 67817 - protein, 268 aa, Unidentified
QTVPWGITRVQAPAVHNRGITGSGVRVAILDSGISTHEDLNVRGGVSFVPGETTYADLNGHGTHVAGTVAALNNSIGVVGVAPSADLYAVKVLGANGRGSVSGIAQGLEWAATNNMHIANMSLGADGPSSTLERAVNYATSRDVLVIAATGNNGSGSVGYPARYANAMAVGATDQNNRRANFSQYGTGIDIVAPGVNVQSTYPGNRYVSMNGTSMATPHVAGAAALVKQRYPSWNATQIRDHLKNTATNLGNSSQFGSGLVNAEAATR

SEQ ID NO: 67818 - protein, 268 aa, Unidentified
QTVPWGITRVQAPAVHNRGITGSGVRVAILDSGISTHEDLNVRGGVSFVPGETTYADLNGHGTHVAGTVAALNNSIGVVGVAPSADLYAVKVLGANGRGSVSGIAQGLEWAAQNNMHIANMSLGAEGPSSTLERAVNYATSRDVLVIAATGNNGSGSVGYPARYANAMAVGATDQNNRRANFSQYGTGIDIVAPGVNVQSTYPGNRYVSMNGTSMATPHVAGAAALVKQRYPSWNATQIRDHLKNTATNLGNSSQFGSGLVNAEAATR

SEQ ID NO: 67819 - protein, 268 aa, Unidentified
QTVPWGITRVQAPAVHNRGITGSGVRVAILDSGISTHEDLTIRGGASFVPGEPTTADLNGHGTHVAGTVAALDNSIGVIGVAPNAELYAVKVLGANGRGSISGIAQGLEWAATNNMHIANMSLGTDAPSSTLERAVNYATSRDVLVIAATGNNGSGTVGYPARYANAMAVGATDQNNRRANFSQYGTGIDIVAPGVNVQSTYPGNRYVSMNGTSMATPHVAGAAALVKQRYPSWNATQIRDHLKNTATNLGNSSQFGSGLVNAEAATR

SEQ ID NO: 67820 - protein, 268 aa, Unidentified
QTVPWGITRVQAPAVHNRGITGSGVRVAILDSGISTHEDLNVRGGVSFVPGEVTYADLNGHGTHVAGTVAALDNSIGVVGVAPSADLYAVKVLGANGRGSVSGIAQGLEWAAQNNMHIANMSLGAEGPSSTLERAVNYATSRDVLVIAATGNNGSGSVGYPARYANAMAVGATDQNNRRANFSQYGTGIDIVAPGVNVQSTYPGNRYVSMNGTSMATPHVAGAAALVKQRYPSWNATQIRNHLKNTATNLGNSSQFGSGLVNAEAATR

SEQ ID NO: 67821 - protein, 268 aa, Unidentified
QTVPWGITRVQAPAVHNRGITGSGVRVAILDSGISTHEDLNVRGGVSFVPGEPTYADLNGHGTHVAGTVAALNNSIGVVGVAPSADLYAVKVLGANGRGSVSGIAQGLEWAAQNNMHIANMSLGTDAPSSTLERAVNYATSRDVLVIAATGNNGSGTVGYPARYANAMAVGATDQNNRRANFSQYGTGIDIVAPGVNVQSTYPGNRYVSMNGTSMATPHVAGAAALVKQRYPSWNATQIRDHLKNTATNLGNSSQFGSGLVNAEAATR

SEQ ID NO: 67822 - protein, 268 aa, Unidentified
QTVPWGITRVQAPAVHNRGITGSGVRVAILDSGISTHEDLNVRGGSSFVPGETTYADLNGHGTHVAGTVAALDNSIGVVGVAPSADLYAVKVLGANGRGSVSGIAQGLEWAAQNNMHIANMSLGAEGPSSTLERAVNYATSRDVLVIAATGNNGSGSVGYPARYANAMAVGATDQNNRRANFSQYGTGIDIVAPGVNVQSTYPGNRYVSMNGTSMATPHVAGAAALVKQRYPSWNATQIRNHLKNTATNLGNSSQFGSGLVNAEAATR

SEQ ID NO: 67823 - protein, 268 aa, Unidentified
QTVPWGITRVQAPAVHNRGITGSGVRVAILDSGISTHEDLNVRGGVSFVPGETTYADLNGHGTHVAGTVAALNNSIGVVGVAPSADLYAVKVLGANGRGSVSEIAQGLEWAAQNNMHIANMSLGAEGPSSTLERAVNYATSRDVLVIAATGNNGSGSVGYPARYANAMAVGATDQNNRRANFSQYGTGIDIVAPGVNVQSTYPGNRYVSMNGTSMATPHVAGAAALVKQRYPSWNATQIRDHLKNTATNLGNSSQFGSGLVNAEAATR

SEQ ID NO: 67824 - protein, 268 aa, Unidentified
QTVPWGITRVQAPAVHNRGITGSGVRVAILDSGISTHEDLNVRGGVSFVPGETTYADLNGHGTHVAGTVAALNNSIGVVGVAPSADLYAVKVLGANGRGSVSGIAQGLEWAAQNNMHIANMSLGAETPSSTLERAVNYATSRDVLVIAATGNNGSGSVGYPARYANAMAVGATDQNNRRANFSQYGTGIDIVAPGVNVQSTYPGNRYVSMNGTSMATPHVAGAAALVKQRYPSWNATQIRDHLKNTATNLGNSSQFGSGLVNAEAATR

SEQ ID NO: 67825 - protein, 268 aa, Unidentified
QTVPWGITRVQAPAVHNRGITGSGVRVAILDSGISTHEDLNVRGGVSFVPGETTYADLNGHGTHVAGTVAALNNSIGVVGVAPSADLYAVKVLGANGRGSVSGIAQGLEWAATNNMHIANMSLGAEGPSSTLERAVNYATSRDVLVIAATGNNGSGSVGYPARYANAMAVGATDQNNRRANFSQYGTGIDIVAPGVNVQSTYPGNRYVSMNGTSMATPHVAGAAALVKQRYPSWNATQIRDHLKNTATNLGNSSQFGSGLVNAEAATR

SEQ ID NO: 67826 - protein, 268 aa, Unidentified
QTVPWGITRVQAPAVHNRGITGSGVRVAILDSGISTHEDLNVRGGVSFVPGEPTYADLNGHGTHVAGTVAALNNSIGVVGVAPNADLYAVKVLGANGRGSVSGIAQGLEWAATNNMHIANMSLGAEGPSSTLERAVNYATSRDVLVIAATGNNGSGSVGYPARYANAMAVGATDQNNRRANFSQYGTGIDIVAPGVNVQSTYPGNRYVSMNGTSMATPHVAGAAALVKQRYPSWNATQIRDHLKNTATNLGNSSQFGSGLVNAEAATR

SEQ ID NO: 67827 - protein, 268 aa, Unidentified
QTVPWGITRVQAPAVHNRGITGSGVRVAILDSGISTHEDLNVRGGVSFVPGETTVADLNGHGTHVAGTVAALDNSIGVVGVAPSADLYAVKVLGANGRGSVSGIAQGLEWAAQNNMHIANMSLGAEGPSSTLERAVNYATSRDVLVIAATGNNGSGSVGYPARYANAMAVGATDQNNRRANFSQYGTGIDIVAPGVNVQSTYPGNRYVSMNGTSMATPHVAGAAALVKQRYPSWNATQIRNHLKNTATNLGNSSQFGSGLVNAEAATR

SEQ ID NO: 67828 - protein, 268 aa, Unidentified
QTVPWGITRVQAPAVHNRGITGSGVRVAILDSGISTHEDLNVRGGVSFVPGETTWADLNGHGTHVAGTVAALNNSIGVVGVAPSADLYAVKVLGANGRGSVSGIAQGLEWAAQNNMHIANMSLGAEGPSSTLERAVNYATSRDVLVIAATGNNGSGSVGYPARYANAMAVGATDQNNRRANFSQYGTGIDIVAPGVNVQSTYPGNRYVSMNGTSMATPHVAGAAALVKQRYPSWNATQIRDHLKNTATNLGNSSQFGSGLVNAEAATR

SEQ ID NO: 67829 - protein, 268 aa, Unidentified
QTVPWGITRVQAPAVHNRGITGSGVRVAILDSGISTHEDLNVRGGVSFVPGETTYADLNGHGTHVAGTVAALNNSIGVIGVAPNAELYAVKVLGANGRGSVSGIAQGLEWAAQNNMHIANMSLGAEGPSSTLERAVNYATSRDVLVIAATGNNGSGSVGYPARYANAMAVGATDQNNRRANFSQYGTGIDIVAPGVNVQSTYPGNRYVSMNGTSMATPHVAGAAALVKQRYPSWNATQIRDHLKNTATNLGNSSQFGSGLVNAEAATR

SEQ ID NO: 67830 - protein, 268 aa, Unidentified
QTVPWGITRVQAPAVHNRGITGSGVRVAILDSGISTHEDLNVRGGVSFVPGETTYADLNGHGTHVAGTVAALDNSIGVVGVAPSADLYAVKVLGANGRGSVSGIAQGLEWAAQNNMHIANMSLGAEGPSSTLERAVNYATSRDVLVIAATGNNGSGSVGYPARYANAMAVGATDQNNRRANFSQYGTGIDIVAPGVNVQSTYPGNRYVSMNGTSMATPHVAGAAALVKQRYPSWNATQIRNHLKNTATNLGNSSQFGSGLVNAEAATR

SEQ ID NO: 67831 - protein, 268 aa, Unidentified
QTVPWGITRVQAPAVHNRGITGSGVRVAILDSGIANHEDLNVRGGVSFVPGEPTTADLNGHGTHVAGTVAALNNSIGVVGVAPSADLYAVKVLGANGRGSVSGIAQGLEWAAANNMHIANMSLGSDAPSSTLERAVNYATSRDVLVIAATGNNGSGSVGYPARYANAMAVGATDQNNRRANFSQYGTGIDIVAPGVNVQSTYPGNRYVSMNGTSMATPHVAGAAALVKQRYPSWNATQIRDHLLSTATNLGNSNQFGSGLVNAEAATR

SEQ ID NO: 67832 - protein, 268 aa, Unidentified
QTVPWGITRVQAPAVHNRGVTGSGVRVAILDSGISTHEDLNIRGGVSFVPGETTYADLNGHGTHVAGTVAALDNSIGVVGVAPSADLYAVKVLGANGRGSVSGIAQGLEWAAQNNMHIANMSLGAEGPSSTLERAVNYATSRDVLVIAATGNNGSGSVGYPARYANAMAVGATDQNNRRANFSQYGTGIDIVAPGVNVQSTYPGNRYVSMNGTSMATPHVAGAAALVKQRYPSWNATQIRDHLKNTATNLGNSSQFGSGLVNAEAATR

SEQ ID NO: 67833 - protein, 268 aa, Unidentified
QTVPWGITRVQAPAVHNRGITGSGVRVAILDSGISTHEDLNVRGGVSFVPGEQTYADLNGHGTHVAGTVAALDNSIGVVGVAPSADLYAVKVLGANGRGSVSGIAQGLEWAAQNNMHIANMSLGAEGPSSTLERAVNYATSRDVLVIAATGNNGSGSVGYPARYANAMAVGATDQNNRRANFSQYGTGIDIVAPGVNVQSTYPGNRYVSMNGTSMATPHVAGAAALVKQRYPSWNATQIRNHLKNTATNLGNSSQFGSGLVNAEAATR

SEQ ID NO: 67834 - protein, 268 aa, Unidentified
QTVPWGITRVQAPAVHNRGITGSGVRVAILDSGISTHEDLNVRGGVSFVPGETTYADLNGHGTHVAGTVAALNNSIGVVGVAPSADLYAVKVLGANGRGSVSGIAQGLEWAATNNMHIANMSLGAEGPSSTLERAVNYATSRDVLVIAATGNNGSGSVGYPARYANAMAVGATDQNNRRANFSQYGTGIDIVAPGVNVQSTYPGNRYVSMNGTSMATPHVAGAAALVKQRYPSWNATQIRDHLKNTATNLGNSSEFGSGLVNAEAATR

SEQ ID NO: 67835 - protein, 268 aa, Unidentified
QTVPWGITRVQAPAVHNRGITGSGVRVAILDSGISTHEDLNVRGGVSFVPGETTYADLNGHGTHVAGTVAALNNSIGVVGVAPWADLYAVKVLGANGRGSVSGIAQGLEWAAQNNMHIANMSLGAEGPSSTLERAVNYATSRDVLVIAATGNNGSGSVGYPARYANAMAVGATDQNNRRANFSQYGTGIDIVAPGVNVQSTYPGNRYVSMNGTSMATPHVAGAAALVKQRYPSWNATQIRNHLKNTATNLGNSSQFGSGLVNAEAATR

SEQ ID NO: 67836 - protein, 268 aa, Unidentified
QTVPWGITRVQAPAVHNRGITGSGVRVAILDSGISTHEDLNVRGGVSFVPGETTYADLNGHGTHVAGTVAALNNSIGVVGVAPSADLYAVKVLGANGRGSVSGIAQGLEWAAQNNMHIANMSLGTELPSSTLERAVNYATSRDVLVIAATGNNGSGSVGYPARYANAMAVGATDQNNRRANFSQYGTGIDIVAPGVNVQSTYPGNRYVSMNGTSMATPHVAGAAALVKQRYPSWNATQIRDHLKNTATNLGNSSQFGSGLVNAEAATR

SEQ ID NO: 67837 - protein, 268 aa, Unidentified
QTVPWGITRVQAPAVHNRGITGSGVRVAILDSGISTHEDLNVRGGVSFVPGETTYADLNGHGTHVAGTVAALNNSIGVVGVAPSADLYAVKVLGANGRGSVSGIAQGLEWAAQNNMHIANMSLGAEGPSSTLEWAVNYATSRDVLVIAATGNNGSGSVGYPARYANAMAVGATDQNNRRANFSQYGTGIDIVAPGVNVQSTYPGNRYVSMNGTSMATPHVAGAAALVKQRYPSWNATQIRDHLKNTATNLGNSSQFGSGLVNAEAATR

SEQ ID NO: 67838 - protein, 268 aa, Unidentified
QTVPWGITRVQAPAVHNRGITGSGVRVAILDSGISTHEDLNVRGGVSFVPGEETYADLNGHGTHVAGTVAALDNSIGVVGVAPSADLYAVKVLGANGRGSVSGIAQGLEWAAQNNMHIANMSLGAEGPSSTLERAVNYATSRDVLVIAATGNNGSGSVGYPARYANAMAVGATDQNNRRANFSQYGTGIDIVAPGVNVQSTYPGNRYVSMNGTSMATPHVAGAAALVKQRYPSWNATQIRNHLKNTATNLGNSSQFGSGLVNAEAATR

SEQ ID NO: 67839 - protein, 268 aa, Unidentified
QTVPWGITRVQAPAVHNRGITGSGVRVAILDSGISTHEDLNVRGGVSFVPGETTYADLNGHGTHVAGTVAALNNSIGVVGVAPSADLYAVKVLGANGRGSVSGIAQGLEWAAQNNMHIANMSLGAEGPSSTLERAVNYATSRDVLVIAATGNNGSGSVGYPARYANAMAVGATDQNNRRANFSQYGTGIDIVAPGVNVQSTYPGNRYVSQNGTSMATPHVAGAAALVKQRYPSWNATQIRDHLKNTATNLGNSSQFGSGLVNAEAATR

SEQ ID NO: 67840 - protein, 268 aa, Unidentified
QTVPWGITRVQAPAVHNRGITGSGVRVAILDSGISTHEDLNVRGGVSFVPGETTYADLNGHGTHVAGTVAALNNSIGVVGVAPSADLYAVKVLGANGIGSVSGIAQGLEWAAQNNMHIANMSLGAEGPSSTLERAVNYATSRDVLVIAATGNNGSGSVGYPARYANAMAVGATDQNNRRANFSQYGTGIDIVAPGVNVQSTYPGNRYVSMNGTSMATPHVAGAAALVKQRYPSWNATQIRDHLKNTATNLGNSSQFGSGLVNAEAATR

SEQ ID NO: 67841 - protein, 268 aa, Unidentified
QTVPWGITRVQAPAVHNRGITGSGVRVAILDSGISTHEDLNVRGGVSFVPGEATYADLNGHGTHVAGTVAALNNSIGVVGVAPSADLYAVKVLGANGRGSVSGIAQGLEWAAQNNMHIANMSLGAEGPSSTLERAVNYATSRDVLVIAATGNNGSGSVGYPARYANAMAVGATDQNNRRANFSQYGTGIDIVAPGVNVQSTYPGNRYVSMNGTSMATPHVAGAAALVKQRYPSWNATQIRDHLKNTATNLGNSSQFGSGLVNAEAATR

SEQ ID NO: 67842 - protein, 268 aa, Unidentified
QTVPWGITRVQAPAVHNRGITGSGVRVAILDSGISTHEDLNVRGGVSFVPGETTYADLNGHGTHVAGTVAALNNSIGVVGVAPSADLYAVKVLGANGRGSVSGIAQGLEWAAQNNMHIANMSLGAEYPSSTLERAVNYATSRDVLVIAATGNNGSGSVGYPARYANAMAVGATDQNNRRANFSQYGTGIDIVAPGVNVQSTYPGNRYVSMNGTSMATPHVAGAAALVKQRYPSWNATQIRDHLKNTATNLGNSSQFGSGLVNAEAATR

SEQ ID NO: 67843 - protein, 268 aa, Unidentified
QTVPWGITRVQAPTVHNRGITGSGVKVAILDTGIAQHSDLTIRGGASFVPGESTTADLNGHGTHVSGTVAALDNSIGVIGVAPSADLYAVKVLGANGRGSVSGIAQGLEWAATNNMHIANMSLGSDAPSTTLERAVNYATSRGVLVIAATGNNGTGSIGYPARYANAMAVGATDQNNRRASFSQYGTGIDIVAPGVGIQSTYLNNSYASMSGTSMATPHVAGVAALVKQKNPSWNATQIRNHLKNTATNLGNSSQFGSGLVNADAATR

SEQ ID NO: 67844 - protein, 268 aa, Unidentified
QVVPWGITRVQAPTVHNRGITGSGVKVAILDTGIAQHSDLTIRGGASFVPGESTTADLNGHGTHVAGTVAALDNNIGVIGVAPSADLYAVKVLGANGRGSVSGIAQGLEWAATNNMHIANMSLGSDAPSTTLERAVNYATSRGVLVIAATGNNGTGSIGYPARYANAMAVGATDQNNRRASFSQYGTGIDIVAPGVGIQSTYLNNSYASMPGTSMATPHVAGVAALVKQKNPSWNATQIRNHLKNTATNLGNSSQFGSGLVNADAATR

SEQ ID NO: 67845 - protein, 268 aa, Unidentified
QTVPWGITRVQAPAVHNRGITGSGVRVAILDSGISTHEDLNVRGGVSFVPGETTKADLNGHGTHVAGTVAALDNSIGVVGVAPSADLYAVKVLGANGRGSVSGIAQGLEWAAQNNMHIANMSLGAEGPSSTLERAVNYATSRDVLVIAATGNNGSGSVGYPARYANAMAVGATDQNNRRANFSQYGTGIDIVAPGVNVQSTYPGNRYVSMNGTSMATPHVAGAAALVKQRYPSWNATQIRNHLKNTATNLGNSSQFGSGLVNAEAATR

SEQ ID NO: 67846 - protein, 268 aa, Unidentified
QTVPWGITRVQAPAVHNRGITGSGVRVAILDSGISTHEDLNVRGGVSFVPGETTYADLNGHGTHVAGTVAALNNSIGVVGVAPVADLYAVKVLGANGRGSVSGIAQGLEWAAQNNMHIANMSLGAEGPSSTLERAVNYATSRDVLVIAATGNNGSGSVGYPARYANAMAVGATDQNNRRANFSQYGTGIDIVAPGVNVQSTYPGNRYVSMNGTSMATPHVAGAAALVKQRYPSWNATQIRNHLKNTATNLGNSSQFGSGLVNAEAATR

SEQ ID NO: 67847 - protein, 268 aa, Unidentified
QTVPWGITRVQAPAVHNRGITGSGVRVAILDSGISTHEDLNVRGGVSFVPGETTYADLNGHGTHVAGTVAALNNSIGVVGVAPSADLYAVKVLGANGRGSVSGIAQGLEWAAQNNMHIANMSLGAEHPSSTLERAVNYATSRDVLVIAATGNNGSGSVGYPARYANAMAVGATDQNNRRANFSQYGTGIDIVAPGVNVQSTYPGNRYVSMNGTSMATPHVAGAAALVKQRYPSWNATQIRDHLKNTATNLGNSSQFGSGLVNAEAATR

SEQ ID NO: 67848 - protein, 268 aa, Unidentified
QTVPWGITRVQAPAVHNRGITGSGVRVAILDSGISTHEDLTVSGGVSFVPGEPTTADLNGHGTHVAGTVAALDNSIGVVGVAPSADLYAVKVLGANGRGSVSGIAQGLEWAAANNMHIANMSLGTDAPSSTLERAVNYATSRDVLVIAATGNNGSGSVGYPARYANAMAVGATDQNNRRANFSQYGTGIDIVAPGVNVQSTYPGNRYVSMNGTSMATPHVAGAAALVKQRYPSWNATQIRNHLKNTATNLGNSSQFGSGLVNAEAATR

SEQ ID NO: 67849 - protein, 268 aa, Unidentified
QTVPWGITRVQAPAVHNRGITGSGVRVAILDSGISTHEDLNVRGGVSFVPGETTYADLNGHGTHVAGTVAALNNSIGVVGVAPSADLYAVKVLGANGRGSVSGIAQGLEWAAQNNMHIANMSLGAEGPSPTLERAVNYATSRDVLVIAATGNNGSGSVGYPARYANAMAVGATDQNNRRANFSQYGTGIDIVAPGVNVQSTYPGNRYVSMNGTSMATPHVAGAAALVKQRYPSWNATQIRDHLKNTATNLGNSSQFGSGLVNAEAATR

SEQ ID NO: 67850 - protein, 268 aa, Unidentified
QTVPWGITRVQAPAVHNRGITGSGVRVAILDSGISTHEDLNVRGGVSFVPGETTYADLNGHGTHVAGTVAALNNSIGVIGVAPNAELYAVKVLGANGRGSVSGIAQGLEWAATNNMHIANMSLGAEFPSSTLERAVNYATSRDVLVIAATGNNGSGSVGYPARYANAMAVGATDQNNRRANFSQYGTGIDIVAPGVNVQSTYPGNRYVSMNGTSMATPHVAGAAALVKQRYPSWNATQIRDHLKNTATNLGNSSQFGSGLVNAEAATR

SEQ ID NO: 67851 - protein, 268 aa, Unidentified
QTVPWGITRVQAPAVHNRGITGSGVRVAILDSGISTHEDLNVRGGVSFVPGETTYADLNGHGTHVAGTVAALNNSIGVVGVAPSADLYAVKVLGANGRGSVSGIAQGLEWAAQNNMHIANMSLGDGAPSSTLERAVNYATSRDVLVIAATGNNGSGSVGYPARYANAMAVGATDQNNRRANFSQYGTGIDIVAPGVNVQSTYPGNRYVSMNGTSMATPHVAGAAALVKQRYPSWNATQIRDHLKNTATNLGNSSQFGSGLVNAEAATR

SEQ ID NO: 67852 - protein, 268 aa, Unidentified
QTVPWGITRVQAPAVHNRGITGSGVRVAILDSGISTHEDLNVRGGVSFVPGETTYADLNGHGTHVAGTVAALNNSIGVVGVAPSADLYAVKVLGANGRGSVSGIAQGLEWAAQNNMHIANMSLGAEGPSSTLERAVNYATSRDVLVIAATGNDGSGSVGYPARYANAMAVGATDQNNRRANFSQYGTGIDIVAPGVNVQSTYPGNRYVSMNGTSMATPHVAGAAALVKQRYPSWNATQIRDHLKNTATNLGNSSQFGSGLVNAEAATR

SEQ ID NO: 67853 - protein, 268 aa, Unidentified
QTVPWGITRVQAPAVHNRGITGSGVRVAILDSGISTHEDLNVRGGVSFVPGETTYADLNGHGTHVAGTVAALNNSIGVIGVAPNAELYAVKVLGANGRGSVSGIAQGLEWAATNNMHIANMSLGAEGPSSTLERAVNYATSRDVLVIAATGNNGSGSVGYPARYANAMAVGATDQNNRRANFSQYGTGIDIVAPGVNVQSTYPGNRYVSMNGTSMATPHVAGAAALVKQRYPSWNATQIRDHLKNTATNLGNSSQFGSGLVNAEAATR

SEQ ID NO: 67854 - protein, 268 aa, Unidentified
QTVPWGITRVQAPAVHNRGITGSGVRVAILDSGISTHEDLNVRGGVSFVPGETTLADLNGHGTHVAGTVAALDNSIGVVGVAPSADLYAVKVLGANGRGSVSGIAQGLEWAAQNNMHIANMSLGAEGPSSTLERAVNYATSRDVLVIAATGNNGSGSVGYPARYANAMAVGATDQNNRRANFSQYGTGIDIVAPGVNVQSTYPGNRYVSMNGTSMATPHVAGAAALVKQRYPSWNATQIRNHLKNTATNLGNSSQFGSGLVNAEAATR

SEQ ID NO: 67855 - protein, 268 aa, Unidentified
QTVPWGITRVQAPAVHNRGITGSGVRVAILDSGISTHEDLNVRGGVSFVPGETTYADLNGHGTHVAGTVAALNNSIGVVGVAPSADLYAVKVLGANGRGSVSGIAQGLEWAAQNNMHIANMSLGAEVPSSTLERAVNYATSRDVLVIAATGNNGSGSVGYPARYANAMAVGATDQNNRRANFSQYGTGIDIVAPGVNVQSTYPGNRYVSMNGTSMATPHVAGAAALVKQRYPSWNATQIRDHLKNTATNLGNSSQFGSGLVNAEAATR

SEQ ID NO: 67856 - protein, 268 aa, Unidentified
QTVPWGITRVQAPAVHNRGITGSGVRVAILDSGISTHEDLNVRGGVSFVPGETTYADLNGHGTHVAGTVAALNNSIGVVGVAPSADLYAVKVLGANGRGSVSGIAQGLEWAAQNNMHIANMSLGAWEPSSTLERAVNYATSRDVLVIAATGNNGSGSVGYPARYANAMAVGATDQNNRRANFSQYGTGIDIVAPGVNVQSTYPGNRYVSMNGTSMATPHVAGAAALVKQRYPSWNATQIRDHLKNTATNLGNSSQFGSGLVNAEAATR

SEQ ID NO: 67857 - protein, 268 aa, Unidentified
QTVPWGITRVQAPAVHNRGITGSGVRVAILDSGISTHEDLNVRGGVSFVPGETTYADLNGHGTHVAGTVAALNNSIGVVGVAPAADLYAVKVLGANGRGSVSGIAQGLEWAAQNNMHIANMSLGAEGPSSTLERAVNYATSRDVLVIAATGNNGSGSVGYPARYANAMAVGATDQNNRRANFSQYGTGIDIVAPGVNVQSTYPGNRYVSMNGTSMATPHVAGAAALVKQRYPSWNATQIRNHLKNTATNLGNSSQFGSGLVNAEAATR

SEQ ID NO: 67858 - protein, 268 aa, Unidentified
QTVPWGITRVQAPAVHNRGITGSGVRVAILDSGISTHEDLNVRGGVSFVPGETTYADLNGHGTHVAGTVAALNNSIGVVGVAPSADLYAVKVLGANGRGSVSGIAQGLEWAAQNNMHIANMSLGVEGPSSTLERAVNYATSRDVLVIAATGNNGSGSVGYPARYANAMAVGATDQNNRRANFSQYGTGIDIVAPGVNVQSTYPGNRYVSMNGTSMATPHVAGAAALVKQRYPSWNATQIRDHLKNTATNLGNSSQFGSGLVNAEAATR

SEQ ID NO: 67859 - protein, 268 aa, Unidentified
QTVPWGITRVQAPAVHNRGITGSGVRVAILDSGISTHEDLNVRGGVSFVPGESTYADLNGHGTHVAGTVAALDNSIGVVGVAPSADLYAVKVLGANGRGSVSGIAQGLEWAAQNNMHIANMSLGAEGPSSTLERAVNYATSRDVLVIAATGNNGSGSVGYPARYANAMAVGATDQNNRRANFSQYGTGIDIVAPGVNVQSTYPGNRYVSMNGTSMATPHVAGAAALVKQRYPSWNATQIRNHLKNTATNLGNSSQFGSGLVNAEAATR

SEQ ID NO: 67860 - protein, 268 aa, Unidentified
QTVPWGITRVQAPAVHNRGITGSGVRVAILDSGISTHEDLNVRGGVSFVPGEGTYADLNGHGTHVAGTVAALDNSIGVVGVAPSADLYAVKVLGANGRGSVSGIAQGLEWAAQNNMHIANMSLGAEGPSSTLERAVNYATSRDVLVIAATGNNGSGSVGYPARYANAMAVGATDQNNRRANFSQYGTGIDIVAPGVNVQSTYPGNRYVSMNGTSMATPHVAGAAALVKQRYPSWNATQIRNHLKNTATNLGNSSQFGSGLVNAEAATR

SEQ ID NO: 67861 - protein, 268 aa, Unidentified
QTVPWGITRVQAPAVHNRGITGSGVRVAILDSGISTHEDLNVRGGVSFVPGETTYADLNGHGTHVAGTVAALNNSIGVVGVAPSADLYAVKVLGANGRGSVSGIAQGLEWAAQNNMHIANMSLGAEGPSSTLETAVNYATSRDVLVIAATGNNGSGSVGYPARYANAMAVGATDQNNRRANFSQYGTGIDIVAPGVNVQSTYPGNRYVSMNGTSMATPHVAGAAALVKQRYPSWNATQIRDHLKNTATNLGNSSQFGSGLVNAEAATR

SEQ ID NO: 67862 - protein, 268 aa, Unidentified
QTVPWGITRVQAPTVHNRGITGSGVKVAILDTGIAQHSDLTIRGGASFVPGESTTADLNGHGTHVAGTVAALDNNIGVIGVAPSADLYAVKVLGANGRGSVSGIAQGLEWAATNNMHIANMSLGSDAPSTTLERAVNYATSRGVLVIAATGNNGTGSIGYPARYANAMAVGATDQNNRRASFSQYGTGIDIVAPGVGIQSTYLNNSYASMPGTSMATPHVAGVAALVKQKNPSWNATQIRNHLKNTATNLGPSSQFGSGLVNADAATR

SEQ ID NO: 67863 - protein, 268 aa, Unidentified
QTVPWGITRVQAPAVHNRGITGSGVRVAILDSGISTHEDLNVRGGVSFVPGETTYADLNGHGTHVAGTVAALNNSIGVVGVAPSADLYAVKVLGANGRGAVSGIAQGLEWAAQNNMHIANMSLGAEGPSSTLERAVNYATSRDVLVIAATGNNGSGSVGYPARYANAMAVGATDQNNRRANFSQYGTGIDIVAPGVNVQSTYPGNRYVSMNGTSMATPHVAGAAALVKQRYPSWNATQIRNHLKNTATNLGNSSQFGSGLVNAEAATR

SEQ ID NO: 67864 - protein, 268 aa, Unidentified
QTVPWGITRVQAPAVHNRGITGSGVRVAILDSGISTHEDLNVRGGVSFVPGETTYADLNGHGTHVAGTVAALNNSIGVVGVAPSADLYAVKVLGANGWGSVSGIAQGLEWAAQNNMHIANMSLGAEGPSSTLERAVNYATSRDVLVIAATGNNGSGSVGYPARYANAMAVGATDQNNRRANFSQYGTGIDIVAPGVNVQSTYPGNRYVSMNGTSMATPHVAGAAALVKQRYPSWNATQIRDHLKNTATNLGNSSQFGSGLVNAEAATR

SEQ ID NO: 67865 - protein, 268 aa, Unidentified
QTVPWGITRVQAPAVHNRGITGSGVRVAILDSGISTHEDLNVRGGVSFVPGETTYADLNGHGTHVAGTVAALNNSIGVVGVAPSADLYAVKVLGANGRGSVSGIAQGLEWAAQNNMHIANMSLGYEGPSSTLERAVNYATSRDVLVIAATGNNGSGSVGYPARYANAMAVGATDQNNRRANFSQYGTGIDIVAPGVNVQSTYPGNRYVSMNGTSMATPHVAGAAALVKQRYPSWNATQIRDHLKNTATNLGNSSQFGSGLVNAEAATR

SEQ ID NO: 67866 - protein, 268 aa, Unidentified
QTVPWGITRVQAPAVHNRGITGSGVRVAILDSGISTHEDLNVRGGVSFVPGETTYADLNGHGTHVAGTVAALNNSIGVIGVAPSADLYAVKVLGANGRGSVSGIAQGLEWAAQNNMHIANMSLGAEGPSSTLERAVNYATSRDVLVIAATGNNGSGSVGYPARYANAMAVGATDQNNRRANFSQYGTGIDIVAPGVNVQSTYPGNRYVSMNGTSMATPHVAGAAALVKQRYPSWNATQIRDHLKNTATNLGNSSQFGSGLVNAEAATR

SEQ ID NO: 67867 - protein, 268 aa, Unidentified
QTVPWGITRVQAPAVHNRGITGSGVRVAILDSGISTHEDLNVRGGWSFVPGETTYADLNGHGTHVAGTVAALDNSIGVVGVAPSADLYAVKVLGANGRGSVSGIAQGLEWAAQNNMHIANMSLGAEGPSSTLERAVNYATSRDVLVIAATGNNGSGSVGYPARYANAMAVGATDQNNRRANFSQYGTGIDIVAPGVNVQSTYPGNRYVSMNGTSMATPHVAGAAALVKQRYPSWNATQIRNHLKNTATNLGNSSQFGSGLVNAEAATR

SEQ ID NO: 67868 - protein, 268 aa, Unidentified
QTVPWGITRVQAPAVHNRGITGSGVRVAILDSGISTHEDLNVRGGVSFVPGETTYADLNGHGTHVAGTVAALNNSIGVVGVAPSADLYAVKVLGANGRGSVSGIAQGLEWAAQNNMHIANMSLGVEVPSSTLERAVNYATSRDVLVIAATGNNGSGSVGYPARYANAMAVGATDQNNRRANFSQYGTGIDIVAPGVNVQSTYPGNRYVSMNGTSMATPHVAGAAALVKQRYPSWNATQIRDHLKNTATNLGNSSQFGSGLVNAEAATR

SEQ ID NO: 67869 - protein, 268 aa, Unidentified
QTVPWGITRVQAPAVHNRGITGSGVRVAILDSGISTHEDLNVRGGVSFVPGETTYADLNGHGTHVAGTVAALNNSIGVVGVAPSADLYAVKVLGANGRGSVSGIAQGLEWAAQNAMHIANMSLGAEGPSSTLERAVNYATSRDVLVIAATGNNGSGSVGYPARYANAMAVGATDQNNRRANFSQYGTGIDIVAPGVNVQSTYPGNRYVSMNGTSMATPHVAGAAALVKQRYPSWNATQIRDHLKNTATNLGNSSQFGSGLVNAEAATR

SEQ ID NO: 67870 - protein, 268 aa, Unidentified
QTVPWGITRVQAPAVHNRGITGSGVRVAILDSGISTHEDLNVRGGVSFVPGETTYADLNGHGTHVAGTVAALNNSIGVVGVAPEADLYAVKVLGANGRGSVSGIAQGLEWAAQNNMHIANMSLGAEGPSSTLERAVNYATSRDVLVIAATGNNGSGSVGYPARYANAMAVGATDQNNRRANFSQYGTGIDIVAPGVNVQSTYPGNRYVSMNGTSMATPHVAGAAALVKQRYPSWNATQIRNHLKNTATNLGNSSQFGSGLVNAEAATR

SEQ ID NO: 67871 - protein, 268 aa, Unidentified
QTVPWGIERVQAPTVHNRGITGSGVKVAILDTGIAQHSDLTIRGGASFVPGESTTADLNGHGTHVSGTVAALDNSIGVIGVAPSADLYAVKVLGANGRGSVSGIAQGLEWAATNNMHIANMSLGSDAPSTTLERAVNYATSRGVLVIAATGNNGTGSIGYPARYANAMAVGATDQNNQRASFSQYGTGIDIVAPGVGIQSTYLNNSYASMPGTSMATPHVAGVAALVKQKNPSWNATQIRNHLKNTATNLGNSSQFGSGLVNADAATR

SEQ ID NO: 67872 - protein, 268 aa, Unidentified
QTVPWGITRVQAPAVHNRGITGSGVRVAILDSGISTHEDLNVRGGVSFVPGEPTTADLNGHGTHVAGTVAALNNSIGVVGVAPSADLYAVKVLGANGRGSISGIAQGLEWAAQNNMHIANMSLGTDAPSSTLERAVNYATSADVLVIAATGNNGSGSVGYPARYANAMAVGATDQNNRRANFSQYGTGIDIVAPGVNVQSTYPGNRYVSMNGTSMATPHVAGAAALVKQRYPSWNATQIRDHLKNTATNLGNSSQFGSGLVNAEAATR

SEQ ID NO: 67873 - protein, 268 aa, Unidentified
QTVPWGITRVQAPAVHNRGITGSGVRVAILDSGISTHEDLNVRGGVSFVPGETTYADLNGHGTHVAGTVAALNNSIGVVGVAPSADLYAVKVLGANGRGSVSGIAQGLEWAAQNNMHIANMSLGAEGPSNTLERAVNYATSRDVLVIAATGNNGSGSVGYPARYANAMAVGATDQNNRRANFSQYGTGIDIVAPGVNVQSTYPGNRYVSMNGTSMATPHVAGAAALVKQRYPSWNATQIRDHLKNTATNLGNSSQFGSGLVNAEAATR

SEQ ID NO: 67874 - protein, 268 aa, Unidentified
QTVPWGITRVQAPAVHNRGITGSGVRVAILDSGISTHEDLNVRGGVSFVPGETTYADLNGHGTHVAGTVAALNNSIGVVGVAPLADLYAVKVLGANGRGSVSGIAQGLEWAAQNNMHIANMSLGAEGPSSTLERAVNYATSRDVLVIAATGNNGSGSVGYPARYANAMAVGATDQNNRRANFSQYGTGIDIVAPGVNVQSTYPGNRYVSMNGTSMATPHVAGAAALVKQRYPSWNATQIRNHLKNTATNLGNSSQFGSGLVNAEAATR

SEQ ID NO: 67875 - protein, 268 aa, Unidentified
QTVPWGITRVQAPTVHNRGITGSGVKVAILDTGIAQHSDLTIRGGASFVPGESTTADLNGHGTHVAGTVAALDNNIGVIGVAPSADLYAVKVLGANGRGSVSGIAQGLEWAATNNMHIANMSLGSDAPSTTLERAVNYATSRGVLVIAATGNNGTGSIGYPARYANAMAVGATDQNNRRASFSQYGTGIDIVAPGVGIQSTYLNNSYASMPGTSMATPHVAGVAALVKQKNPSWNATQIRNHLKNTATNLGNSSQFGSGLVNADAATR

SEQ ID NO: 67876 - protein, 268 aa, Unidentified
QTVPWGITRVQAPAVHNRGITGSGVRVAILDSGISTHEDLNVRGGVSFVPGETTYADLNGHGTHVAGTVAALNNSIGVVGVAPHADLYAVKVLGANGRGSVSGIAQGLEWAAQNNMHIANMSLGAEGPSSTLERAVNYATSRDVLVIAATGNNGSGSVGYPARYANAMAVGATDQNNRRANFSQYGTGIDIVAPGVNVQSTYPGNRYVSMNGTSMATPHVAGAAALVKQRYPSWNATQIRNHLKNTATNLGNSSQFGSGLVNAEAATR

SEQ ID NO: 67877 - protein, 268 aa, Unidentified
QTVPWGITRVQAPAVHNRGITGSGVRVAILDSGISTHEDLNVRGGVSFVPGETTYADLNGHGTHVAGTVAALNNSIGVVGVAPSADLYAVKVLGANGRGSVSGIAQGLEWAAQNNMHIANMSLGAELPSSTLERAVNYATSRDVLVIAATGNNGSGSVGYPARYANAMAVGATDQNNRRANFSQYGTGIDIVAPGVNVQSTYPGNRYVSMNGTSMATPHVAGAAALVKQRYPSWNATQIRDHLKNTATNLGNSSQFGSGLVNAEAATR

SEQ ID NO: 67878 - protein, 268 aa, Unidentified
QTVPWGITRVQAPAVHNRGITGSGVRVAILDSGISTHEDLNVRGGVSFVPGETTYADLNGHGTHVAGTVAALNNSIGVVGVAPSADLYAVKVLGANGEGSVSGIAQGLEWAAQNNMHIANMSLGTDAPSSTLERAVNYATSRDVLVIAATGNNGSGSVGYPARYANAMAVGATDQNNRRANFSQYGTGIDIVAPGVNVQSTYPGNRYVSMNGTSMATPHVAGAAALVKQRYPSWNATQIRDHLKNTATNLGNSSQFGSGLVNAEAATR

SEQ ID NO: 67879 - protein, 268 aa, Unidentified
QTVPWGITRVQAPAVHNRGITGSGVRVAILDSGISTHEDLNVRGGVSFVPGETTYADLNGHGTHVAGTVAALNNSIGVVGVAPSADLYAVKVLGANGRGSVSGIAQGLEWAAQNNMHIANMSLGAEGPSSTLENAVNYATSRDVLVIAATGNNGSGSVGYPARYANAMAVGATDQNNRRANFSQYGTGIDIVAPGVNVQSTYPGNRYVSMNGTSMATPHVAGAAALVKQRYPSWNATQIRDHLKNTATNLGNSSQFGSGLVNAEAATR

SEQ ID NO: 67880 - protein, 268 aa, Unidentified
QTVPWGITRVQAPAVHNRGITGSGVRVAILDSGISTHEDLNVRGGVSFVPGETTYADLNGHGTHVAGTVAALNNSIGVVGVAPSADLYAVKVLGANGQGSVSGIAQGLEWAAQNNMHIANMSLGAEGPSSTLERAVNYATSRDVLVIAATGNNGSGSVGYPARYANAMAVGATDQNNRRANFSQYGTGIDIVAPGVNVQSTYPGNRYVSMNGTSMATPHVAGAAALVKQRYPSWNATQIRDHLKNTATNLGNSSQFGSGLVNAEAATR

SEQ ID NO: 67881 - protein, 268 aa, Unidentified
QVVPWGITRVQAPTVHNRGITGSGVKVAILDTGIAQHSDLTIRGGASFVPGESTTADLNGHGTHVSGTVAALNNNIGVIGVAPSADLYAVKVLGANGRGSVSGIAQGLEWAATNNMHIANMSLGSDAPSTTLERAVNYATSRGVLVIAATGNNGTGSIGYPARYANAMAVGATDQNNRRASFSQYGTGIDIVAPGVGIQSTYLNNSYASMSGTSMATPHVAGVAALVKQKNPSWNATQIRNHLKNTATNLGNSSQFGSGLVNADAATR

SEQ ID NO: 67882 - protein, 268 aa, Unidentified
QTVPWGITRVQAPAVHNRGITGSGVRVAILDSGISTHEDLNVRGGVSFVPGETTYADLNGHGTHVAGTVAALNNSIGVVGVAPSADLYAVKVLGANGRGSVSGIAQGLEWAAQNNMHIANMSLGQEGPSSTLERAVNYATSRDVLVIAATGNNGSGSVGYPARYANAMAVGATDQNNRRANFSQYGTGIDIVAPGVNVQSTYPGNRYVSMNGTSMATPHVAGAAALVKQRYPSWNATQIRDHLKNTATNLGNSSQFGSGLVNAEAATR

SEQ ID NO: 67883 - protein, 268 aa, Unidentified
QTVPWGITRVQAPAVHNRGITGSGVRVAILDSGISTHEDLNVRGGFSFVPGETTYADLNGHGTHVAGTVAALDNSIGVVGVAPSADLYAVKVLGANGRGSVSGIAQGLEWAAQNNMHIANMSLGAEGPSSTLERAVNYATSRDVLVIAATGNNGSGSVGYPARYANAMAVGATDQNNRRANFSQYGTGIDIVAPGVNVQSTYPGNRYVSMNGTSMATPHVAGAAALVKQRYPSWNATQIRNHLKNTATNLGNSSQFGSGLVNAEAATR

SEQ ID NO: 67884 - protein, 268 aa, Unidentified
QTVPWGITRVQAPAVHNRGITGSGVRVAILDSGISTHEDLNVRGGVSFVPGETTYADLNGHGTHVAGTVAALNNSIGVVGVAPSADLYAVKVLGANGRGSVSGIAQGLEWAAQNNMHIANMSLGAEGPSSTLEKAVNYATSRDVLVIAATGNNGSGSVGYPARYANAMAVGATDQNNRRANFSQYGTGIDIVAPGVNVQSTYPGNRYVSMNGTSMATPHVAGAAALVKQRYPSWNATQIRDHLKNTATNLGNSSQFGSGLVNAEAATR

SEQ ID NO: 67885 - protein, 268 aa, Unidentified
QTVPWGITRVQAPTVHNRGITGSGVKVAILDTGIAQHSDLTIRGGASFVPGESTTADLNGHGTHVSGTVAALNNNIGVIGVAPSADLYAVKVLGANGRGSVSGIAQGLEWAATNNMHIANMSLGSDAPSTTLERAVNYATSRGVLVIAATGNNGTGSIGYPARYANAMAVGATDQNNRRASFSQYGTGIDIVAPGVGIQSTYLNNSYASMSGTSMATPHVAGVAALVKQKNPSWNATQIRNHLKNTATNLGNSSQFGSGLVNADAATR

SEQ ID NO: 67886 - protein, 268 aa, Unidentified
QTVPWGITRVQAPAVHNRGITGSGVRVAILDSGISTHEDLNVRGGVSFVPGETTYADLNGHGTHVAGTVAALSNSIGVVGVAPSADLYAVKVLGANGRGSVSGIAQGLEWAAQNNMHIANMSLGAEGPSSTLERAVNYATSRDVLVIAATGNNGSGSVGYPARYANAMAVGATDQNNRRANFSQYGTGIDIVAPGVNVQSTYPGNRYVSMNGTSMATPHVAGAAALVKQRYPSWNATQIRNHLKNTATNLGNSSQFGSGLVNAEAATR

SEQ ID NO: 67887 - protein, 268 aa, Unidentified
QTVPWGITRVQAPAVHNRGITGSGVRVAILDSGISAHEDLNVRGGVSFVPGEPTYADLNGHGTHVAGTVAALNNSIGVVGVAPSADLYAVKVLGANGRGSVSGIAQGLEWAATNNMHIANMSLGAEGPSSTLERAVNYATSRDVLVIAATGNNGSGSVGYPARYANAMAVGATDQNNRRANFSQYGTGIDIVAPGVNVQSTYPGNRYVSMNGTSMATPHVAGAAALVKQRYPSWNATQIRDHLKNTATNLGNSSQFGSGLVNAEAATR

SEQ ID NO: 67888 - protein, 268 aa, Unidentified
QTVPWGITRVQAPTVHNRGITGSGVKVAILDTGIAQHEDLTIRGGASFVPGESTTADLNGHGTHVSGTVAALNNNIGVIGVAPSADLYAVKVLGANGRGSVSGIAQGLEWAATNNMHIANMSLGSDAPSTTLERAVNYATSRGVLVIAATGNNGTGSIGYPARYANAMAVGATDQNNRRASFSQYGTGIDIVAPGVGIQSTYLNNSYASMSGTSMATPHVAGVAALVKQKNPSWNATQIRNHLKNTATNLGNSSQFGSGLVNADAATR

SEQ ID NO: 67889 - protein, 268 aa, Unidentified
QTVPWGITRVQAPAVHNRGITGSGVRVAILDSGISTHEDLTIRGGVSFVPGEPTTADLNGHGTHVAGTVAALDNSIGVVGVAPSADLYAVKVLGANGRGSISGIAQGLEWAAQNNMHIANMSLGTDAPSSTLERAVNYATSRDVLVIAATGNNGSGSVGYPARYANAMAVGATDQNNRRANFSQYGTGIDIVAPGVNVQSTYPGNRYVSMNGTSMATPHVAGAAALVKQRYPSWNATQIRDHLKNTATNLGNSSQFGSGLVNAEAATR

SEQ ID NO: 67890 - protein, 268 aa, Unidentified
QTVPWGITRVQAPAVHNRGITGSGVRVAILDSGISTHEDLNVRGGVSFVPGETTYADLNGHGTHVAGTVAALNNSIGVVGVAPSADLYAVKVLGANGRGSVSGIAQGLEWAAQNNMHIANMSLGMADPSSTLERAVNYATSRDVLVIAATGNNGSGSVGYPARYANAMAVGATDQNNRRANFSQYGTGIDIVAPGVNVQSTYPGNRYVSMNGTSMATPHVAGAAALVKQRYPSWNATQIRDHLKNTATNLGNSSQFGSGLVNAEAATR

SEQ ID NO: 67891 - protein, 268 aa, Unidentified
QVVPWGITRVQAPTVHNRGITGSGVKVAILDTGIAQHEDLTIRGGASFVPGESTTADLNGHGTHVAGTVAALDNNIGVIGVAPSADLYAVKVLGANGRGSVSGIAQGLEWAATNNMHIANMSLGSDAPSTTLERAVNYATSRGVLVIAATGNNGTGSIGYPARYANAMAVGATDQNNRRASFSQYGTGIDIVAPGVGIQSTYLNNSYASMPGTSMATPHVAGVAALVKQKNPSWNATQIRNHLKNTATNLGNSSQFGSGLVNADAATR

SEQ ID NO: 67892 - protein, 268 aa, Unidentified
QTVPWGITRVQAPAVHNRGITGSGVRVAILDSGISTHEDLNVRGGVSFVPGETTHADLNGHGTHVAGTVAALDNSIGVVGVAPSADLYAVKVLGANGRGSVSGIAQGLEWAAQNNMHIANMSLGAEGPSSTLERAVNYATSRDVLVIAATGNNGSGSVGYPARYANAMAVGATDQNNRRANFSQYGTGIDIVAPGVNVQSTYPGNRYVSMNGTSMATPHVAGAAALVKQRYPSWNATQIRNHLKNTATNLGNSSQFGSGLVNAEAATR

SEQ ID NO: 67893 - protein, 268 aa, Unidentified
QTVPWGIERVQAPTVHNRGITGSGVKVAILDTGIAQHSDLTIRGGASFVPGESTTADLNGHGTHVAGTVAALDNNIGVIGVAPSADLYAVKVLGANGRGSVSGIAQGLEWAATNNMHIANMSLGSDAPSTTLERAVNYATSRGVLVIAATGNNGTGSIGYPARYANAMAVGATDQNNRRASFSQYGTGIDIVAPGVGIQSTYLNNSYASMPGTSMATPHVAGVAALVKQKNPSWNATQIRNHLKNTATNLGNSSQFGSGLVNADAATR

SEQ ID NO: 67894 - protein, 268 aa, Unidentified
QTVPWGITRVQAPAVHNRGITGSGVRVAILDSGISTHEDLNVRGGVSFVPGETTYADLNGHGTHVAGTVAALNNSIGVVGVAPSADLYAVKVLGANGRGSVSGIAQGLEWAAQNNMHIANMSLGAEGPSSTLEVAVNYATSRDVLVIAATGNNGSGSVGYPARYANAMAVGATDQNNRRANFSQYGTGIDIVAPGVNVQSTYPGNRYVSMNGTSMATPHVAGAAALVKQRYPSWNATQIRDHLKNTATNLGNSSQFGSGLVNAEAATR

SEQ ID NO: 67895 - protein, 268 aa, Unidentified
QTVPWGITRVQAPAVHNRGITGSGVRVAILDSGISTHEDLNVRGGVSFVPGETTYADLNGHGTHVAGTVAALNNSIGVVGVAPSADLYAVKVLGANGRGSVSGIAQGLEWAAQNNMHIANMSLGANCPSSTLERAVNYATSRDVLVIAATGNNGSGSVGYPARYANAMAVGATDQNNRRANFSQYGTGIDIVAPGVNVQSTYPGNRYVSMNGTSMATPHVAGAAALVKQRYPSWNATQIRDHLKNTATNLGNSSQFGSGLVNAEAATR

SEQ ID NO: 67896 - protein, 268 aa, Unidentified
QVVPWGITRVQAPTVHNRGITGSGVKVAILDTGIAQHEDLTIRGGASFVPGESTTADLNGHGTHVSGTVAALDNSIGVIGVAPSADLYAVKVLGANGRGSVSGIAQGLEWAATNNMHIANMSLGSDAPSTTLERAVNYATSRGVLVIAATGNNGTGSIGYPARYANAMAVGATDQNNRRASFSQYGTGIDIVAPGVGIQSTYLNNSYASMPGTSMATPHVAGVAALVKQKNPSWNATQIRNHLKNTATNLGNSSQFGSGLVNADAATR

SEQ ID NO: 67897 - protein, 268 aa, Unidentified
QTVPWGITRVQAPAVHNRGITGSGVRVAILDSGISTHEDLNVRGGVSFVPGETTYADLNGHGTHVAGTVAALNNSIGVVGVAPSADLYAVKVLGANGRGSVSGIAQGLEWAAQNNMHIANMSLGGEDPSSTLERAVNYATSRDVLVIAATGNNGSGSVGYPARYANAMAVGATDQNNRRANFSQYGTGIDIVAPGVNVQSTYPGNRYVSMNGTSMATPHVAGAAALVKQRYPSWNATQIRDHLKNTATNLGNSSQFGSGLVNAEAATR

SEQ ID NO: 67898 - protein, 268 aa, Unidentified
QTVPWGITRVQAPAVHNRGITGSGVRVAILDSGISTHEDLNVRGGVSFVPGETTYADLNGHGTHVAGTVAALNNSIGVVGVAPSADLYAVKVLGANGKGSVSGIAQGLEWAAQNNMHIANMSLGAEGPSSTLERAVNYATSRDVLVIAATGNNGSGSVGYPARYANAMAVGATDQNNRRANFSQYGTGIDIVAPGVNVQSTYPGNRYVSMNGTSMATPHVAGAAALVKQRYPSWNATQIRDHLKNTATNLGNSSQFGSGLVNAEAATR

SEQ ID NO: 67899 - protein, 268 aa, Unidentified
QTVPWGITRVQAPAVHNRGITGSGVRVAILDSGISTHEDLNVRGGVSFVPGETTYADLNGHGTHVAGTVAALNNSIGVVGVAPSADLYAVKVLGANGRGSVSGIAQGLEWAAQNNMHIANMSLGLGEPSSTLERAVNYATSRDVLVIAATGNNGSGSVGYPARYANAMAVGATDQNNRRANFSQYGTGIDIVAPGVNVQSTYPGNRYVSMNGTSMATPHVAGAAALVKQRYPSWNATQIRDHLKNTATNLGNSSQFGSGLVNAEAATR

SEQ ID NO: 67900 - protein, 268 aa, Unidentified
QTVPWGITRVQAPAVHNRGITGSGVRVAILDSGISTHEDLNVRGGVSFVPGETTYADLNGHGTHVAGTVAALNNSIGVVGVAPSADLYAVKVLGANGTGSVSGIAQGLEWAAQNNMHIANMSLGAEGPSSTLERAVNYATSRDVLVIAATGNNGSGSVGYPARYANAMAVGATDQNNRRANFSQYGTGIDIVAPGVNVQSTYPGNRYVSMNGTSMATPHVAGAAALVKQRYPSWNATQIRDHLKNTATNLGNSSQFGSGLVNAEAATR

SEQ ID NO: 67901 - protein, 268 aa, Unidentified
QTVPWGITRVQAPTVHNRGITGSGVKVAILDTGIAQHEDLTIRGGASFVPGESTTADLNGHGTHVSGTVAALDNSIGVIGVAPSADLYAVKVLGANGRGSVSGIAQGLEWAATNNMHIANMSLGSDAPSTTLERAVNYATSRGVLVIAATGNNGTGSIGYPARYANAMAVGATDQNNRRASFSQYGTGIDIVAPGVGIQSTYLNNSYASMPGTSMATPHVAGVAALVKQKNPSWNATQIRNHLKNTATNLGNSSQFGSGLVNADAATR

SEQ ID NO: 67902 - protein, 268 aa, Unidentified
QTVPWGITRVQAPAVHNRGITGSGVRVAILDSGISTHEDLNVRGGVSFVPGETTYADLNGHGTHVAGTVAALNNSIGVVGVAPSADLYAVKVLGANGRGSVSGIAQGLEWAAQNNMHIANMSLGAEGPSSTLERAVNEATSRDVLVIAATGNNGSGSVGYPARYANAMAVGATDQNNRRANFSQYGTGIDIVAPGVNVQSTYPGNRYVSMNGTSMATPHVAGAAALVKQRYPSWNATQIRDHLKNTATNLGNSSQFGSGLVNAEAATR

SEQ ID NO: 67903 - protein, 268 aa, Unidentified
QTVPWGITRVQAPAVHNRGITGSGVRVAILDSGISTHEDLNVRGGVSFVPGETTMADLNGHGTHVAGTVAALDNSIGVVGVAPSADLYAVKVLGANGRGSVSGIAQGLEWAAQNNMHIANMSLGAEGPSSTLERAVNYATSRDVLVIAATGNNGSGSVGYPARYANAMAVGATDQNNRRANFSQYGTGIDIVAPGVNVQSTYPGNRYVSMNGTSMATPHVAGAAALVKQRYPSWNATQIRNHLKNTATNLGNSSQFGSGLVNAEAATR

SEQ ID NO: 67904 - protein, 268 aa, Unidentified
QTVPWGITRVQAPAVHNRGITGSGVRVAILDSGISTHEDLNVRGGVSFVPGETTYADLNGHGTHVAGTVAALNNSIGVVGVAPSADLYAVKVLGANGRGSVSGIAQGLEWAAQNNMHIANMSLGLDHPSSTLERAVNYATSRDVLVIAATGNNGSGSVGYPARYANAMAVGATDQNNRRANFSQYGTGIDIVAPGVNVQSTYPGNRYVSMNGTSMATPHVAGAAALVKQRYPSWNATQIRDHLKNTATNLGNSSQFGSGLVNAEAATR

SEQ ID NO: 67905 - protein, 268 aa, Unidentified
QTVPWGITRVQAPAVHNRGITGSGVRVAILDSGISTHEDLNVRGGVSFVPGETTYADLNGHGTHVAGTVAALNNSIGVVGVAPSADLYAVKVLGANGRGSVSGIAQGLEWAAQNNMHIANMSLGAEGPSSTLEMAVNYATSRDVLVIAATGNNGSGSVGYPARYANAMAVGATDQNNRRANFSQYGTGIDIVAPGVNVQSTYPGNRYVSMNGTSMATPHVAGAAALVKQRYPSWNATQIRDHLKNTATNLGNSSQFGSGLVNAEAATR

SEQ ID NO: 67906 - protein, 268 aa, Unidentified
QTVPWGITRVQAPAVHNRGITGSGVRVAILDSGISAHEDLNIRGGVSFVPGEPTYADLNGHGTHVAGTVAALNNSIGVIGVAPNADLYAVKVLGANGRGSVSGIAQGLEWAAANNMHIANMSLGTDAPSSTLERAVNYATSRDVLVIAATGNNGSGSVGYPARYANAMAVGATDQNNRRANFSQYGTGIDIVAPGVNVQSTYPGNRYVSMNGTSMATPHVAGAAALVKQRYPSWNATQIRDHLKNTATNLGNSSQFGSGLVNAEAATR

SEQ ID NO: 67907 - protein, 268 aa, Unidentified
QTVPWGITRVQAPAVHNRGITGSGVRVAILDSGISTHEDLNVRGGVSFVPGEPTYADLNGHGTHVAGTVAALNNSIGVVGVAPNADLYAVKVLGANGRGSVSGIAQGLEWAAQNNMHIANMSLGAEGPSSTLERAVNYATSRDVLVIAATGNNGSGSVGYPARYANAMAVGATDQNNRRANFSQYGTGIDIVAPGVNVQSTYPGNRYVSMNGTSMATPHVAGAAALVKQRYPSWNATQIRDHLKNTATNLGNSSQFGSGLVNAEAATR

SEQ ID NO: 67908 - protein, 268 aa, Unidentified
QTVPWGITRVQAPAVHNRGITGSGVRVAILDSGISTHEDLNVRGGVSFVPGEPTTADLNGHGTHVAGTVAALNNSIGVVGVAPSADLYAVKVLGANGRGSVSGIAQGLEWAAANNMHIANMSLGTDAPSSTLERAVNYATSADVLVIAATGNNGSGTVGYPARYANAMAVGATDQNNRRANFSQYGTGIDIVAPGVNVQSTYPGNRYVSMNGTSMATPHVAGAAALVKQRYPSWNATQIRDHLKNTATNLGNSSQFGSGLVNAEAATR

SEQ ID NO: 67909 - protein, 268 aa, Unidentified
QTVPWGITRVQAPAVHNRGITGSGVRVAILDSGISTHEDLNVRGGVSFVPGETTYADLNGHGTHVAGTVAALNNSIGVVGVAPSADLYAVKVLGANGRGSVSGIAQGLEWAAQNQMHIANMSLGAEGPSSTLERAVNYATSRDVLVIAATGNNGSGSVGYPARYANAMAVGATDQNNRRANFSQYGTGIDIVAPGVNVQSTYPGNRYVSMNGTSMATPHVAGAAALVKQRYPSWNATQIRDHLKNTATNLGNSSQFGSGLVNAEAATR

SEQ ID NO: 67910 - protein, 268 aa, Unidentified
QTVPWGITRVQAPAVHNRGITGSGVRVAILDSGISAHEDLNVRGGVSFVPGEPTYADLNGHGTHVAGTVAALNNSIGVVGVAPSADLYAVKVLGANGRGSVSGIAQGLEWAAQNNMHIANMSLGAEGPSSTLERAVNYATSRDVLVIAATGNNGSGSVGYPARYANAMAVGATDQNNRRANFSQYGTGIDIVAPGVNVQSTYPGNRYVSMNGTSMATPHVAGAAALVKQRYPSWNATQIRDHLKNTATNLGNSSQFGSGLVNAEAATR

SEQ ID NO: 67911 - protein, 268 aa, Unidentified
QTVPWGITRVQAPTVHNRGITGSGVKVAILDTGIAQHSDLTIRGGASFVPGESTTADLNGHGTHVAGTVAALDNNIGVIGVAPSADLYAVKVLGANGRGSVSGIAQGLEWAATNNMHIANMSLGSDAPSTTLERAVNYATSRGVLVIAATGNNGTGSIGYPARYANAMAVGATDQNNQRASFSQYGTGIDIVAPGVGIQSTYLNNSYASMPGTSMATPHVAGVAALVKQKNPSWNATQIRNHLKNTATNLGNSSQFGSGLVNADAATR

SEQ ID NO: 67912 - protein, 268 aa, Unidentified
QVVPWGITRVQAPTVHNRGITGSGVKVAILDTGIAQHSDLTIRGGASFVPGESTTADLNGHGTHVAGTVAALDNNIGVIGVAPSADLYAVKVLGANGRGSVSGIAQGLEWAATNNMHIANMSLGSDAPSTTLERAVNYATSRGVLVIAATGNNGTGSIGYPARYANAMAVGATDQNNRRASFSQYGTGIDIVAPGVGIQSTYLNNSYASMPGTSMATPHVAGVAALVKQKNPSWNATQIRNHLKNTATNLGPSSQFGSGLVNADAATR

SEQ ID NO: 67913 - protein, 268 aa, Unidentified
QVVPWGITRVQAPTVHNRGITGSGVKVAILDTGIAQHSDLTIRGGASFVPGESTTADLNGHGTHVSGTVAALDNSIGVIGVAPSADLYAVKVLGANGRGSVSGIAQGLEWAATNNMHIANMSLGSDAPSTTLERAVNYATSRGVLVIAATGNNGTGSIGYPARYANAMAVGATDQNNRRASFSQYGTGIDIVAPGVGIQSTYLNNSYASMPGTSMATPHVAGVAALVKQKNPSWNATQIRNHLKNTATNLGNSSQFGSGLVNADAATR

SEQ ID NO: 67914 - protein, 268 aa, Unidentified
QTVPWGITRVQAPAVHNRGITGSGVRVAILDSGISTHEDLNVRGGVSFVPGETTYADLNGHGTHVAGTVAALNNSIGVVGVAPSADLYAVKVLGANGRGSVSGIAQGLEWAAQNNMHIANMSLGLTQPSSTLERAVNYATSRDVLVIAATGNNGSGSVGYPARYANAMAVGATDQNNRRANFSQYGTGIDIVAPGVNVQSTYPGNRYVSMNGTSMATPHVAGAAALVKQRYPSWNATQIRDHLKNTATNLGNSSQFGSGLVNAEAATR

SEQ ID NO: 67915 - protein, 268 aa, Unidentified
QTVPWGITRVQAPAVHNRGITGSGVRVAILDSGISTHEDLNVRGGVSFVPGETTYADLNGHGTHVAGTVAALNNSIGVVGVAPSADLYAVKVLGANGRGSVSGIAQGLEWAAQNNMHIANMSLGAEGPSSTLERAVNYATSRDVLVIAATGNNGSGSVGYPARYANAMAVGATDQNNRRANFSQYGTGIDIVAPGVNVQSTYPGNRYVSMNGTSQATPHVAGAAALVKQRYPSWNATQIRDHLKNTATNLGNSSQFGSGLVNAEAATR

SEQ ID NO: 67916 - protein, 268 aa, Unidentified
QTVPWGITRVQAPAVHNRGITGSGVRVAILDSGISTHEDLNVRGGVSFVPGETTYADLNGHGTHVAGTVAALNNSIGVVGVAPSADLYAVKVLGANGRGSVSGIAQGLEWAAQNNMHIANMSLGAEMPSSTLERAVNYATSRDVLVIAATGNNGSGSVGYPARYANAMAVGATDQNNRRANFSQYGTGIDIVAPGVNVQSTYPGNRYVSMNGTSMATPHVAGAAALVKQRYPSWNATQIRDHLKNTATNLGNSSQFGSGLVNAEAATR

SEQ ID NO: 67917 - protein, 268 aa, Unidentified
QTVPWGITRVQAPAVHNRGITGSGVRVAILDSGISTHEDLNVRGGVSFVPGETTYADLNGHGTHVAGTVAALNNSIGVVGVAPSADLYAVKVLGANGRGSVSGIAQGLEWAAQNNMHIANMSLGTEAPSSTLERAVNYATSRDVLVIAATGNNGSGSVGYPARYANAMAVGATDQNNRRANFSQYGTGIDIVAPGVNVQSTYPGNRYVSMNGTSMATPHVAGAAALVKQRYPSWNATQIRDHLKNTATNLGNSSQFGSGLVNAEAATR

SEQ ID NO: 67918 - protein, 268 aa, Unidentified
QTVPWGITRVQAPAVHNRGITGSGVRVAILDSGISTHEDLNVRGGVSFVPGETTYADLNGHGTHVAGTVAALNNSIGVVGVAPSADLYAVKVLGANGRGSISGIAQGLEWAAQNNMHIANMSLGAEGPSSTLERAVNYATSRDVLVIAATGNNGSGSVGYPARYANAMAVGATDQNNRRANFSQYGTGIDIVAPGVNVQSTYPGNRYVSMNGTSMATPHVAGAAALVKQRYPSWNATQIRNHLKNTATNLGNSSQFGSGLVNAEAATR

SEQ ID NO: 67919 - protein, 268 aa, Unidentified
QTVPWGITRVQAPAVHNRGITGSGVRVAILDSGISTHEDLNVRGGVSFVPGETTYADLNGHGTHVAGTVAALNNSIGVVGVAPSADLYAVKVLGANGRGSVSGIAQGLEWAAQNHMHIANMSLGAEGPSSTLERAVNYATSRDVLVIAATGNNGSGSVGYPARYANAMAVGATDQNNRRANFSQYGTGIDIVAPGVNVQSTYPGNRYVSMNGTSMATPHVAGAAALVKQRYPSWNATQIRDHLKNTATNLGNSSQFGSGLVNAEAATR

SEQ ID NO: 67920 - protein, 268 aa, Unidentified
QTVPWGITRVQAPAVHNRGITGSGVRVAILDSGISTHEDLNVRGGISFVPGETTYADLNGHGTHVAGTVAALDNSIGVVGVAPSADLYAVKVLGANGRGSVSGIAQGLEWAAQNNMHIANMSLGAEGPSSTLERAVNYATSRDVLVIAATGNNGSGSVGYPARYANAMAVGATDQNNRRANFSQYGTGIDIVAPGVNVQSTYPGNRYVSMNGTSMATPHVAGAAALVKQRYPSWNATQIRNHLKNTATNLGNSSQFGSGLVNAEAATR

SEQ ID NO: 67921 - protein, 268 aa, Unidentified
QTVPWGITRVQAPAVHNRGITGSGVRVAILDSGISTHEDLNVRGGVSFVPGETTYADLNGHGTHVAGTVAALNNSIGVVGVAPSADLYAVKVLGANGRGSVSGIAQGLEWAAQNNMHIANMSLGAEGPSSTLERAVNLATSRDVLVIAATGNNGSGSVGYPARYANAMAVGATDQNNRRANFSQYGTGIDIVAPGVNVQSTYPGNRYVSMNGTSMATPHVAGAAALVKQRYPSWNATQIRDHLKNTATNLGNSSQFGSGLVNAEAATR

SEQ ID NO: 67922 - protein, 268 aa, Unidentified
QTVPWGITRVQAPAVHNRGITGSGVRVAILDSGISTHEDLNVRGGVSFVPGETTPADLNGHGTHVAGTVAALDNSIGVVGVAPSADLYAVKVLGANGRGSVSGIAQGLEWAAQNNMHIANMSLGAEGPSSTLERAVNYATSRDVLVIAATGNNGSGSVGYPARYANAMAVGATDQNNRRANFSQYGTGIDIVAPGVNVQSTYPGNRYVSMNGTSMATPHVAGAAALVKQRYPSWNATQIRNHLKNTATNLGNSSQFGSGLVNAEAATR

SEQ ID NO: 67923 - protein, 268 aa, Unidentified
QTVPWGITRVQAPAVHNRGITGSGVRVAILDSGISTHEDLNVRGGVSFVPGETTYADLNGHGTHVAGTVAALNNSIGVVGVAPSADLYAVKVLGANGRGSVSGIAQGLEWAAQNNMHIANMSLGAEGPSSTLELAVNYATSRDVLVIAATGNNGSGSVGYPARYANAMAVGATDQNNRRANFSQYGTGIDIVAPGVNVQSTYPGNRYVSMNGTSMATPHVAGAAALVKQRYPSWNATQIRDHLKNTATNLGNSSQFGSGLVNAEAATR

SEQ ID NO: 67924 - protein, 268 aa, Unidentified
QTVPWGITRVQAPAVHNRGITGSGVRVAILDSGISTHEDLNIRGGVSFVPGETTYADLNGHGTHVAGTVAALDNSIGVVGVAPSADLYAVKVLGANGRGSVSGIAQGLEWAAQNNMHIANMSLGAEGPSSTLERAVNYATSRDVLVIAATGNNGSGSVGYPARYANAMAVGATDQNNRRANFSQYGTGIDIVAPGVNVQSTYPGNRYVSMNGTSMATPHVAGAAALVKQRYPSWNATQIRDHLKNTATNLGNSSQFGSGLVNAEAATR

SEQ ID NO: 67925 - protein, 268 aa, Unidentified
QTVPWGITRVQAPAVHNRGITGSGVRVAILDSGISAHSDLNIRGGASFVPGEPTTADLNGHGTHVAGTVAALDNSIGVVGVAPSADLYAVKVLGANGRGSISGIAQGLEWAATNNMHIANMSLGTDAPSSTLERAVNYATSXDVLVIAATGNNGSGSVGYPARYANAMAVGATDQNNRRANFSQYGTGIDIVAPGVNVQSTYPGNRYVSMNGTSMATPHVAGAAALVKQRYPSWNATQIRDHLKNTATNLGNSSQFGSGLVNAEAATR

SEQ ID NO: 67926 - protein, 268 aa, Unidentified
QTVPWGITRVQAPAVHNRGITGSGVRVAILDSGISTHEDLNVRGGVSFVPGETTYADLNGHGTHVAGTVAALNNSIGVVGVAPSADLYAVKVLGANGRGSVSGIAQGLEWAAQNNMHIANMSLGNGLPSSTLERAVNYATSRDVLVIAATGNNGSGSVGYPARYANAMAVGATDQNNRRANFSQYGTGIDIVAPGVNVQSTYPGNRYVSMNGTSMATPHVAGAAALVKQRYPSWNATQIRDHLKNTATNLGNSSQFGSGLVNAEAATR

SEQ ID NO: 67927 - protein, 268 aa, Unidentified
QTVPWGITRVQAPAVHNRGITGSGVRVAILDSGISTHEDLNVRGGVSFVPGETTYADLNGHGTHVAGTVAALNNSIGVVGVAPSADLYAVKVLGANGHGSVSGIAQGLEWAAQNNMHIANMSLGAEGPSSTLERAVNYATSRDVLVIAATGNNGSGSVGYPARYANAMAVGATDQNNRRANFSQYGTGIDIVAPGVNVQSTYPGNRYVSMNGTSMATPHVAGAAALVKQRYPSWNATQIRDHLKNTATNLGNSSQFGSGLVNAEAATR

SEQ ID NO: 67928 - protein, 268 aa, Unidentified
QTVPWGITRVQAPAVHNRGITGSGVRVAILDSGISTHEDLNVRGGVSFVPGETTYADLNGHGTHVAGTVAALNNSIGVVGVAPSADLYAVKVLGANGRGSVSGIAQGLEWAAQNNMHIANMSLGAEGPSETLERAVNYATSRDVLVIAATGNNGSGSVGYPARYANAMAVGATDQNNRRANFSQYGTGIDIVAPGVNVQSTYPGNRYVSMNGTSMATPHVAGAAALVKQRYPSWNATQIRDHLKNTATNLGNSSQFGSGLVNAEAATR

SEQ ID NO: 67929 - protein, 268 aa, Unidentified
QTVPWGITRVQAPAVHNRGITGSGVRVAILDSGISTHEDLNVRGGVSFVPGETTYADLNGHGTHVAGTVAALNNSIGVVGVAPQADLYAVKVLGANGRGSVSGIAQGLEWAAQNNMHIANMSLGAEGPSSTLERAVNYATSRDVLVIAATGNNGSGSVGYPARYANAMAVGATDQNNRRANFSQYGTGIDIVAPGVNVQSTYPGNRYVSMNGTSMATPHVAGAAALVKQRYPSWNATQIRNHLKNTATNLGNSSQFGSGLVNAEAATR

SEQ ID NO: 67930 - protein, 268 aa, Unidentified
QTVPWGITRVQAPTVHNRGITGSGVKVAILDTGIAQHSDLTIRGGASFVPGESTTADLNGHGTHVSGTVAALDNSIGVIGVAPSADLYAVKVLGANGRGSVSGIAQGLEWAATNNMHIANMSLGSDAPSTTLERAVNYATSRGVLVIAATGNNGTGSIGYPARYANAMAVGATDQNNQRASFSQYGTGIDIVAPGVGIQSTYLNNSYASMPGTSMATPHVAGVAALVKQKNPSWNATQIRNHLKNTATNLGNSSQFGSGLVNADAATR

SEQ ID NO: 67931 - protein, 268 aa, Unidentified
QTVPWGITRVQAPAVHNRGITGSGVRVAILDSGISTHEDLNVRGGVSFVPGETTYADLNGHGTHVAGTVAALNNSIGVVGVAPSADLYAVKVLGANGRGSVSGIAQGLEWAAQNNMHIANMSLGTYDPSSTLERAVNYATSRDVLVIAATGNNGSGSVGYPARYANAMAVGATDQNNRRANFSQYGTGIDIVAPGVNVQSTYPGNRYVSMNGTSMATPHVAGAAALVKQRYPSWNATQIRDHLKNTATNLGNSSQFGSGLVNAEAATR

SEQ ID NO: 67932 - protein, 268 aa, Unidentified
QTVPWGITRVQAPAVHNRGITGSGVRVAILDSGISTHEDLNVRGGVSFVPGETTYADLNGHGTHVAGTVAALNNSIGVVGVAPSADLYAVKVLGANGRGSVSGIAQGLEWAAQNNMHIANMSLGAEGPSQTLERAVNYATSRDVLVIAATGNNGSGSVGYPARYANAMAVGATDQNNRRANFSQYGTGIDIVAPGVNVQSTYPGNRYVSMNGTSMATPHVAGAAALVKQRYPSWNATQIRDHLKNTATNLGNSSQFGSGLVNAEAATR

SEQ ID NO: 67933 - protein, 268 aa, Unidentified
QTVPWGITRVQAPAVHNRGITGSGVRVAILDSGISTHEDLNVRGGVSFVPGETTYADLNGHGTHVAGTVAALNNSIGVVGVAPSADLYAVKVLGANGRGSVSGIAQGLEWAAQNNMHIANMSLGAEGPSSTLEHAVNYATSRDVLVIAATGNNGSGSVGYPARYANAMAVGATDQNNRRANFSQYGTGIDIVAPGVNVQSTYPGNRYVSMNGTSMATPHVAGAAALVKQRYPSWNATQIRDHLKNTATNLGNSSQFGSGLVNAEAATR

SEQ ID NO: 67934 - protein, 268 aa, Unidentified
QTVPWGITRVQAPAVHNRGITGSGVRVAILDSGISTHEDLNVRGGVSFVPGETTYADLNGHGTHVAGTVAALNNSIGVVGVAPSADLYAVKVLGANGRGSVSGIAQGLEWAAQNNMHIANMSLGAEGPSSTLERAVNYATSRDVLVIAATGNNGSGSVGYPARYANAMAVGATDQNNRRANFSQYGTGIDIVAPGVNVQSTYPGNRYVSDNGTSMATPHVAGAAALVKQRYPSWNATQIRDHLKNTATNLGNSSQFGSGLVNAEAATR

SEQ ID NO: 67935 - protein, 268 aa, Unidentified
QTVPWGITRVQAPAVHNRGITGSGVRVAILDSGISTHEDLNVRGGVSFVPGETTQADLNGHGTHVAGTVAALDNSIGVVGVAPSADLYAVKVLGANGRGSVSGIAQGLEWAAQNNMHIANMSLGAEGPSSTLERAVNYATSRDVLVIAATGNNGSGSVGYPARYANAMAVGATDQNNRRANFSQYGTGIDIVAPGVNVQSTYPGNRYVSMNGTSMATPHVAGAAALVKQRYPSWNATQIRNHLKNTATNLGNSSQFGSGLVNAEAATR

SEQ ID NO: 67936 - protein, 268 aa, Unidentified
QTVPWGITRVQAPAVHNRGITGSGVRVAILDSGISTHEDLNVRGGVSFVPGETTYADLNGHGTHVAGTVAALNNSIGVVGVAPSADLYAVKVLGANGRGSVSGIAQGLEWAAANNMHIANMSLGAEGPSSTLERAVNYATSRDVLVIAATGNNGSGSVGYPARYANAMAVGATDQNNRRANFSQYGTGIDIVAPGVNVQSTYPGNRYVSMNGTSMATPHVAGAAALVKQRYPSWNATQIRDHLKNTATNLGNSSQFGSGLVNAEAATR

SEQ ID NO: 67937 - protein, 268 aa, Unidentified
QTVPWGITRVQAPAVHNRGITGSGVRVAILDSGISTHEDLNVRGGVSFVPGETTYADLNGHGTHVAGTVAALNNSIGVVGVAPSADLYAVKVLGANGRGSVSGIAQGLEWAAQNNMHIANMSLGAEGPSTTLERAVNYATSRDVLVIAATGNNGSGSVGYPARYANAMAVGATDQNNRRANFSQYGTGIDIVAPGVNVQSTYPGNRYVSMNGTSMATPHVAGAAALVKQRYPSWNATQIRDHLKNTATNLGNSSQFGSGLVNAEAATR

SEQ ID NO: 67938 - protein, 268 aa, Unidentified
QTVPWGITRVQAPAVHNRGITGSGVRVAILDSGISTHEDLNVRGGVSFVPGETTYADLNGHGTHVAGTVAALNNSIGVVGVAPSADLYAVKVLGANGRGSVSGIAQGLEWAAQNNMHIANMSLGYDLPSSTLERAVNYATSRDVLVIAATGNNGSGSVGYPARYANAMAVGATDQNNRRANFSQYGTGIDIVAPGVNVQSTYPGNRYVSMNGTSMATPHVAGAAALVKQRYPSWNATQIRDHLKNTATNLGNSSQFGSGLVNAEAATR

SEQ ID NO: 67939 - protein, 268 aa, Unidentified
QTVPWGITRVQAPAVHNRGITGSGVRVAILDSGISTHEDLNVRGGVSFVPGETTYADLNGHGTHVAGTVAALNNSIGVVGVAPSADLYAVKVLGANGRGSVSGIAQGLEWAAQNNMHIANMSLGADQPSSTLERAVNYATSRDVLVIAATGNNGSGSVGYPARYANAMAVGATDQNNRRANFSQYGTGIDIVAPGVNVQSTYPGNRYVSMNGTSMATPHVAGAAALVKQRYPSWNATQIRDHLKNTATNLGNSSQFGSGLVNAEAATR

SEQ ID NO: 67940 - protein, 268 aa, Unidentified
QTVPWGITRVQAPAVHNRGITGSGVRVAILDSGISTHEDLNVRGGVSFVPGEITYADLNGHGTHVAGTVAALDNSIGVVGVAPSADLYAVKVLGANGRGSVSGIAQGLEWAAQNNMHIANMSLGAEGPSSTLERAVNYATSRDVLVIAATGNNGSGSVGYPARYANAMAVGATDQNNRRANFSQYGTGIDIVAPGVNVQSTYPGNRYVSMNGTSMATPHVAGAAALVKQRYPSWNATQIRNHLKNTATNLGNSSQFGSGLVNAEAATR

SEQ ID NO: 67941 - protein, 268 aa, Unidentified
QTVPWGIERVQAPTVHNRGITGSGVKVAILDTGIAQHSDLTIRGGASFVPGESTTADLNGHGTHVAGTVAALDNNIGVIGVAPSADLYAVKVLGANGRGSVSGIAQGLEWAATNNMHIANMSLGSDAPSTTLERAVNYATSRGVLVIAATGNNGTGSIGYPARYANAMAVGATDQNNQRASFSQYGTGIDIVAPGVGIQSTYLNNSYASMPGTSMATPHVAGVAALVKQKNPSWNATQIRNHLKNTATNLGNSSQFGSGLVNADAATR

SEQ ID NO: 67942 - protein, 268 aa, Unidentified
QTVPWGITRVQAPTVHNRGITGSGVKVAILDTGIAQHSDLTIRGGASFVPGESTTADLNGHGTHVSGTVAALNNNIGVIGVAPSADLYAVKVLGANGRGSVSGIAQGLEWAATNNMHIANMSLGSDAPSTTLERAVNYATSRGVLVIAATGNNGTGSIGYPARYANAMAVGATDQNNRRASFSQYGTGIDIVAPGVGIQSTYLNNSYASMPGTSMATPHVAGVAALVKQKNPSWNATQIRNHLKNTATNLGPSSQFGSGLVNADAATR

SEQ ID NO: 67943 - protein, 268 aa, Unidentified
QTVPWGITRVQAPAVHNRGITGSGVRVAILDSGISTHEDLNVRGGESFVPGETTYADLNGHGTHVAGTVAALDNSIGVVGVAPSADLYAVKVLGANGRGSVSGIAQGLEWAAQNNMHIANMSLGAEGPSSTLERAVNYATSRDVLVIAATGNNGSGSVGYPARYANAMAVGATDQNNRRANFSQYGTGIDIVAPGVNVQSTYPGNRYVSMNGTSMATPHVAGAAALVKQRYPSWNATQIRNHLKNTATNLGNSSQFGSGLVNAEAATR

SEQ ID NO: 67944 - protein, 268 aa, Unidentified
QTVPWGITRVQAPAVHNRGITGSGVRVAILDSGISTHEDLNVRGGVSFVPGETTYADLNGHGTHVAGTVAALNNSIGVVGVAPSADLYAVKVLGANGFGSVSGIAQGLEWAAQNNMHIANMSLGAEGPSSTLERAVNYATSRDVLVIAATGNNGSGSVGYPARYANAMAVGATDQNNRRANFSQYGTGIDIVAPGVNVQSTYPGNRYVSMNGTSMATPHVAGAAALVKQRYPSWNATQIRDHLKNTATNLGNSSQFGSGLVNAEAATR

SEQ ID NO: 67945 - protein, 268 aa, Unidentified
QTVPWGITRVQAPAVHNRGITGSGVRVAILDSGISTHEDLNVRGGVSFVPGETTYADLNGHGTHVAGTVAALNNSIGVVGVAPSADLYAVKVLGANGAGSVSGIAQGLEWAAQNNMHIANMSLGAEGPSSTLERAVNYATSRDVLVIAATGNNGSGSVGYPARYANAMAVGATDQNNRRANFSQYGTGIDIVAPGVNVQSTYPGNRYVSMNGTSMATPHVAGAAALVKQRYPSWNATQIRDHLKNTATNLGNSSQFGSGLVNAEAATR

SEQ ID NO: 67946 - protein, 268 aa, Unidentified
QTVPWGITRVQAPAVHNRGITGSGVRVAILDSGISTHEDLNVRGGVSFVPGETTYADLNGHGTHVAGTVAALNNSIGVVGVAPSADLYAVKVLGANGRGSVSGIAQGLEWAAQNNMHIANMSLGAEIPSSTLERAVNYATSRDVLVIAATGNNGSGSVGYPARYANAMAVGATDQNNRRANFSQYGTGIDIVAPGVNVQSTYPGNRYVSMNGTSMATPHVAGAAALVKQRYPSWNATQIRDHLKNTATNLGNSSQFGSGLVNAEAATR

SEQ ID NO: 67947 - protein, 268 aa, Unidentified
QTVPWGITRVQAPAVHNRGITGSGVRVAILDSGISTHEDLNVRGGVSFVPGETTYADLNGHGTHVAGTVAALHNSIGVVGVAPSADLYAVKVLGANGRGSVSGIAQGLEWAAQNNMHIANMSLGAEGPSSTLERAVNYATSRDVLVIAATGNNGSGSVGYPARYANAMAVGATDQNNRRANFSQYGTGIDIVAPGVNVQSTYPGNRYVSMNGTSMATPHVAGAAALVKQRYPSWNATQIRNHLKNTATNLGNSSQFGSGLVNAEAATR

SEQ ID NO: 67948 - protein, 268 aa, Unidentified
QTVPWGITRVQAPAVHNRGITGSGVRVAILDSGISTHEDLNVRGGNSFVPGETTYADLNGHGTHVAGTVAALDNSIGVVGVAPSADLYAVKVLGANGRGSVSGIAQGLEWAAQNNMHIANMSLGAEGPSSTLERAVNYATSRDVLVIAATGNNGSGSVGYPARYANAMAVGATDQNNRRANFSQYGTGIDIVAPGVNVQSTYPGNRYVSMNGTSMATPHVAGAAALVKQRYPSWNATQIRNHLKNTATNLGNSSQFGSGLVNAEAATR

SEQ ID NO: 67949 - protein, 268 aa, Unidentified
QTVPWGITRVQAPAVHNRGITGSGVRVAILDSGISTHEDLNVRGGVSFVPGETTYADLNGHGTHVAGTVAALNNSIGVVGVAPSADLYAVKVLGANGRGSVSGIAQGLEWAAQNNMHIANMSLGAEGPSSTLERAVNYATSRDVLVIAATGNNGSGSVGYPARYANAMAVGATDQNNRRANFSQYGTGIDIVAPGVNVQSTYPGNRYVSENGTSMATPHVAGAAALVKQRYPSWNATQIRDHLKNTATNLGNSSQFGSGLVNAEAATR

SEQ ID NO: 67950 - protein, 268 aa, Unidentified
QTVPWGITRVQAPAVHNRGITGSGVRVAILDSGISTHEDLNVRGGYSFVPGETTYADLNGHGTHVAGTVAALDNSIGVVGVAPSADLYAVKVLGANGRGSVSGIAQGLEWAAQNNMHIANMSLGAEGPSSTLERAVNYATSRDVLVIAATGNNGSGSVGYPARYANAMAVGATDQNNRRANFSQYGTGIDIVAPGVNVQSTYPGNRYVSMNGTSMATPHVAGAAALVKQRYPSWNATQIRNHLKNTATNLGNSSQFGSGLVNAEAATR

SEQ ID NO: 67951 - protein, 268 aa, Unidentified
QTVPWGITRVQAPAVHNRGITGSGVRVAILDSGISTHEDLNVRGGVSFVPGETTCADLNGHGTHVAGTVAALDNSIGVVGVAPSADLYAVKVLGANGRGSVSGIAQGLEWAAQNNMHIANMSLGAEGPSSTLERAVNYATSRDVLVIAATGNNGSGSVGYPARYANAMAVGATDQNNRRANFSQYGTGIDIVAPGVNVQSTYPGNRYVSMNGTSMATPHVAGAAALVKQRYPSWNATQIRNHLKNTATNLGNSSQFGSGLVNAEAATR

SEQ ID NO: 67952 - protein, 268 aa, Unidentified
QTVPWGITRVQAPAVHNRGITGSGVRVAILDSGISTHEDLNIRGGASFVPGEPTTADLNGHGTHVAGTVAALDNSIGVIGVAPNAELYAVKVLGANGRGSISGIAQGLEWAATNNMHIANMSLGTDAPSSTLERAVNYATSADVLVIAATGNNGSGSVGYPARYANAMAVGATDQNNRRANFSQYGTGIDIVAPGVNVQSTYPGNRYVSMSGTSMATPHVAGAAALVKQRYPSWNATQIRDHLKNTATNLGNSSQFGSGLVNAEAATR

SEQ ID NO: 67953 - protein, 268 aa, Unidentified
QTVPWGITRVQAPTVHNRGITGSGVKVAILDTGIAQHSDLTIRGGASFVPGESTTADLNGHGTHVSGTVAALDNSIGVIGVAPSADLYAVKVLGANGRGSVSGIAQGLEWAATNNMHIANMSLGSDAPSTTLERAVNYATSRGVLVIAATGNNGTGSIGYPARYANAMAVGATDQNNRRASFSQYGTGIDIVAPGVGIQSTYLNNSYASMPGTSMATPHVAGVAALVKQKNPSWNATQIRNHLKNTATNLGNSSQFGSGLVNADAATR

SEQ ID NO: 67954 - protein, 268 aa, Unidentified
QTVPWGITRVQAPAVHNRGITGSGVRVAILDSGISTHEDLNVRGGVSFVPGETTYADLNGHGTHVAGTVAALNNSIGVIGVAPSADLYAVKVLGANGRGSVSGIAQGLEWAATNNMHIANMSLGAEGPSSTLERAVNYATSRDVLVIAATGNNGSGSVGYPARYANAMAVGATDQNNRRANFSQYGTGIDIVAPGVNVQSTYPGNRYVSMNGTSMATPHVAGAAALVKQRYPSWNATQIRDHLKNTATNLGNSSQFGSGLVNAEAATR

SEQ ID NO: 67955 - protein, 268 aa, Unidentified
QTVPWGITRVQAPAVHNRGITGSGVRVAILDSGISTHEDLNVRGGVSFVPGETTYADLNGHGTHVAGTVAALNNSIGVVGVAPSADLYAVKVLGANGRGSVSGIAQGLEWAAQNNMHIANMSLGTEGPSSTLERAVNYATSRDVLVIAATGNNGSGSVGYPARYANAMAVGATDQNNRRANFSQYGTGIDIVAPGVNVQSTYPGNRYVSMNGTSMATPHVAGAAALVKQRYPSWNATQIRDHLKNTATNLGNSSQFGSGLVNAEAATR

SEQ ID NO: 67956 - protein, 268 aa, Unidentified
QTVPWGITRVQAPAVHNRGITGSGVRVAILDSGISTHEDLNVRGGVSFVPGEPTTADLNGHGTHVAGTVAALDNSIGVIGVAPSADLYAVKVLGANGRGSVSGIAQGLEWAAANNMHIANMSLGSDAPSSTLERAVNYATSRDVLVIAATGNNGSGSVGYPARYANAMAVGATDQNNRRANFSQYGTGIDIVAPGVNVQSTYPGNRYVSMSGTSMATPHVAGAAALVKQRYPSWNATQIRQHLLNTATNLGNSSQFGSGLVNAEAATR

SEQ ID NO: 67957 - protein, 268 aa, Unidentified
QTVPWGITRVQAPAVHNRGITGSGVRVAILDSGISTHEDLNVRGGVSFVPGETTYADLNGHGTHVAGTVAALNNSIGVVGVAPSADLYAVKVLGANGYGSVSGIAQGLEWAAQNNMHIANMSLGAEGPSSTLERAVNYATSRDVLVIAATGNNGSGSVGYPARYANAMAVGATDQNNRRANFSQYGTGIDIVAPGVNVQSTYPGNRYVSMNGTSMATPHVAGAAALVKQRYPSWNATQIRDHLKNTATNLGNSSQFGSGLVNAEAATR

SEQ ID NO: 67958 - protein, 268 aa, Unidentified
QTVPWGITRVQAPTVHNRGITGSGVKVAILDTGIAQHSDLTIRGGASFVPGESTTADLNGHGTHVSGTVAALNNNIGVIGVAPSADLYAVKVLGANGRGSVSGIAQGLEWAATNNMHIANMSLGSDAPSTTLERAVNYATSRGVLVIAATGNNGTGSIGYPARYANAMAVGATDQNNRRASFSQYGTGIDIVAPGVGIQSTYLNNSYASMPGTSMATPHVAGVAALVKQKNPSWNATQIRNHLKNTATNLGNSSQFGSGLVNADAATR

SEQ ID NO: 67959 - protein, 268 aa, Unidentified
QTVPWGITRVQAPAVHNRGITGSGVRVAILDSGISTHEDLNVRGGVSFVPGETTIADLNGHGTHVAGTVAALDNSIGVVGVAPSADLYAVKVLGANGRGSVSGIAQGLEWAAQNNMHIANMSLGAEGPSSTLERAVNYATSRDVLVIAATGNNGSGSVGYPARYANAMAVGATDQNNRRANFSQYGTGIDIVAPGVNVQSTYPGNRYVSMNGTSMATPHVAGAAALVKQRYPSWNATQIRNHLKNTATNLGNSSQFGSGLVNAEAATR

SEQ ID NO: 67960 - protein, 268 aa, Unidentified
QTVPWGITRVQAPTVHNRGITGSGVKVAILDTGIAQHEDLTIRGGASFVPGESTTADLNGHGTHVAGTVAALDNNIGVIGVAPSADLYAVKVLGANGRGSVSGIAQGLEWAATNNMHIANMSLGSDAPSTTLERAVNYATSRGVLVIAATGNNGTGSIGYPARYANAMAVGATDQNNRRASFSQYGTGIDIVAPGVGIQSTYLNNSYASMPGTSMATPHVAGVAALVKQKNPSWNATQIRNHLKNTATNLGNSSQFGSGLVNADAATR

SEQ ID NO: 67961 - protein, 268 aa, Unidentified
QTVPWGITRVQAPAVHNRGITGSGVRVAILDSGISTHEDLNVRGGMSFVPGETTYADLNGHGTHVAGTVAALDNSIGVVGVAPSADLYAVKVLGANGRGSVSGIAQGLEWAAQNNMHIANMSLGAEGPSSTLERAVNYATSRDVLVIAATGNNGSGSVGYPARYANAMAVGATDQNNRRANFSQYGTGIDIVAPGVNVQSTYPGNRYVSMNGTSMATPHVAGAAALVKQRYPSWNATQIRNHLKNTATNLGNSSQFGSGLVNAEAATR

SEQ ID NO: 67962 - protein, 268 aa, Unidentified
QTVPWGITRVQAPAVHNRGITGSGVRVAILDSGISTHEDLNVRGGVSFVPGETTYADLNGHGTHVAGTVAALNNSIGVVGVAPPADLYAVKVLGANGRGSVSGIAQGLEWAAQNNMHIANMSLGAEGPSSTLERAVNYATSRDVLVIAATGNNGSGSVGYPARYANAMAVGATDQNNRRANFSQYGTGIDIVAPGVNVQSTYPGNRYVSMNGTSMATPHVAGAAALVKQRYPSWNATQIRNHLKNTATNLGNSSQFGSGLVNAEAATR

SEQ ID NO: 67963 - protein, 268 aa, Unidentified
QTVPWGITRVQAPAVHNRGITGSGVRVAILDSGISTHEDLNVRGGQSFVPGETTYADLNGHGTHVAGTVAALDNSIGVVGVAPSADLYAVKVLGANGRGSVSGIAQGLEWAAQNNMHIANMSLGAEGPSSTLERAVNYATSRDVLVIAATGNNGSGSVGYPARYANAMAVGATDQNNRRANFSQYGTGIDIVAPGVNVQSTYPGNRYVSMNGTSMATPHVAGAAALVKQRYPSWNATQIRNHLKNTATNLGNSSQFGSGLVNAEAATR

SEQ ID NO: 67964 - protein, 268 aa, Unidentified
QTVPWGITRVQAPAVHNRGITGSGVRVAILDSGISTHEDLNVRGGVSFVPGETTYADLNGHGTHVAGTVAALNNSIGVVGVAPSADLYAVKVLGAEGRGSVSGIAQGLEWAAQNNMHIANMSLGAEGPSSTLERAVNYATSRDVLVIAATGNNGSGSVGYPARYANAMAVGATDQNNRRANFSQYGTGIDIVAPGVNVQSTYPGNRYVSMNGTSMATPHVAGAAALVKQRYPSWNATQIRDHLKNTATNLGNSSQFGSGLVNAEAATR

SEQ ID NO: 67965 - protein, 268 aa, Unidentified
QTVPWGITRVQAPAVHNRGITGSGVRVAILDSGISTHEDLNVRGGVSFVPGETTAADLNGHGTHVAGTVAALDNSIGVVGVAPSADLYAVKVLGANGRGSVSGIAQGLEWAAQNNMHIANMSLGAEGPSSTLERAVNYATSRDVLVIAATGNNGSGSVGYPARYANAMAVGATDQNNRRANFSQYGTGIDIVAPGVNVQSTYPGNRYVSMNGTSMATPHVAGAAALVKQRYPSWNATQIRNHLKNTATNLGNSSQFGSGLVNAEAATR

SEQ ID NO: 67966 - protein, 268 aa, Unidentified
QTVPWGITRVQAPAVHNRGITGSGVRVAILDSGISTHEDLNVRGGVSFVPGEPTTADLNGHGTHVAGTVAALDNSIGVIGVAPSADLYAVKVLGANGRGSVSGIAQGLEWAAANNMHIANMSLGTDAPSSTLERAVNYATSRDVLVIAATGNNGSGTVGYPARYANAMAVGATDQNNRRANFSQYGTGIDIVAPGVNVQSTYPGNRYVSMSGTSMATPHVAGAAALVKQRYPSWNATQIRNHLKNTATNLGNSSQFGSGLVNAEAATR

SEQ ID NO: 67967 - protein, 268 aa, Unidentified
QTVPWGITRVQAPAVHNRGITGSGVRVAILDSGISTHEDLNVRGGVSFVPGETTYADLNGHGTHVAGTVAALNNSIGVVGVAPSADLYAVKVLGANGRGSESGIAQGLEWAAQNNMHIANMSLGAEGPSSTLERAVNYATSRDVLVIAATGNNGSGSVGYPARYANAMAVGATDQNNRRANFSQYGTGIDIVAPGVNVQSTYPGNRYVSMNGTSMATPHVAGAAALVKQRYPSWNATQIRNHLKNTATNLGNSSQFGSGLVNAEAATR

SEQ ID NO: 67968 - protein, 268 aa, Unidentified
QTVPWGITRVQAPAVHNRGITGSGVRVAILDSGISTHEDLNVRGGVSFVPGETTYADLNGHGTHVAGTVAALNNSIGVVGVAPSADLYAVKVLGANGRGSVSGIAQGLEWAAQNNMHIANMSLGAEQPSSTLERAVNYATSRDVLVIAATGNNGSGSVGYPARYANAMAVGATDQNNRRANFSQYGTGIDIVAPGVNVQSTYPGNRYVSMNGTSMATPHVAGAAALVKQRYPSWNATQIRDHLKNTATNLGNSSQFGSGLVNAEAATR

SEQ ID NO: 67969 - protein, 268 aa, Unidentified
QTVPWGITRVQAPAVHNRGITGSGVRVAILDSGISTHEDLNVRGGVSFVPGELTYADLNGHGTHVAGTVAALDNSIGVVGVAPSADLYAVKVLGANGRGSVSGIAQGLEWAAQNNMHIANMSLGAEGPSSTLERAVNYATSRDVLVIAATGNNGSGSVGYPARYANAMAVGATDQNNRRANFSQYGTGIDIVAPGVNVQSTYPGNRYVSMNGTSMATPHVAGAAALVKQRYPSWNATQIRNHLKNTATNLGNSSQFGSGLVNAEAATR

SEQ ID NO: 67970 - protein, 268 aa, Unidentified
QTVPWGITRVQAPAVHNRGITGSGVRVAILDSGISTHEDLNVRGGVSFVPGETTWADLNGHGTHVAGTVAALDNSIGVVGVAPSADLYAVKVLGANGRGSVSGIAQGLEWAAQNNMHIANMSLGAEGPSSTLERAVNYATSRDVLVIAATGNNGSGSVGYPARYANAMAVGATDQNNRRANFSQYGTGIDIVAPGVNVQSTYPGNRYVSMNGTSMATPHVAGAAALVKQRYPSWNATQIRNHLKNTATNLGNSSQFGSGLVNAEAATR

SEQ ID NO: 67971 - protein, 378 aa, Bacillus sp.
MNKKMGKIVAGTALIISVAFSSSIAQAAEEAKEKYLIGFKEQEVMSQFVDQMMAMSILFLLKRQDVEIDLLHEFDFIPVLSVELDPEDVDALELDPAIAYIEEDAEVTTMQTVPWGINRVQAPIAQSRGFTGTGVRVAVLDTGISNHADLRIRGGASFVPGEPNISDGNGHGTQVAGTIAALNNSIGVLGVAPNVDLYGVKVLGASGSGSISGIAQGLQWAANNGMHIANMSLGSSAGSATMEQAVNQATASGVLVVAASGNSGAGNVGFPARYANAMAVGATDQNNNRATFSQYGAGLDIVAPGVGVQSTVPGNGYPSFNGTSMATPHVAGVAALVKQKNPSWSNVQIRNHLKNTATNLGNTTQFGSGLVNAEAATR

SEQ ID NO: 67972 - protein, 268 aa, Unidentified
QTVPWGITRVQAPAVHNRGITGSGVRVAILDSGISAHEDLNVRGGVSFVPGETTYADLNGHGTHVAGTVAALNNSIGVVGVAPSADLYAVKVLGANGRGSVSGIAQGLEWAATNNMHIANMSLGAEGPSSTLERAVNYATSRDVLVIAATGNNGSGSVGYPARYANAMAVGATDQNNRRANFSQYGTGIDIVAPGVNVQSTYPGNRYVSMNGTSMATPHVAGAAALVKQRYPSWNATQIRDHLKNTATNLGNSSQFGSGLVNAEAATR

SEQ ID NO: 67973 - protein, 268 aa, Unidentified
QTVPWGITRVQAPAVHNRGITGSGVRVAILDSGISTHEDLNVRGGVSFVPGETTYADLNGHGTHVAGTVAALNNSIGVVGVAPSADLYAVKVLGANGRGSVSGIAQGLEWAAQNNMDIANMSLGAEGPSSTLERAVNYATSRDVLVIAATGNNGSGSVGYPARYANAMAVGATDQNNRRANFSQYGTGIDIVAPGVNVQSTYPGNRYVSMNGTSMATPHVAGAAALVKQRYPSWNATQIRDHLKNTATNLGNSSQFGSGLVNAEAATR

SEQ ID NO: 67974 - protein, 268 aa, Unidentified
QTVPWGITRVQAPAVHNRGITGSGVRVAILDSGISTHEDLNVRGGVSFVPGEPTTADLNGHGTHVAGTVAALDNSIGVVGVAPSADLYAVKVLGANGRGSVSGIAQGLEWAAANNMHIANMSLGTDAPSSTLERAVNYATSRDVLVIAATGNNGSGTVGYPARYANAMAVGATDQNNRRANFSQYGTGIDIVAPGVNVQSTYPGNRYVSMSGTSMATPHVAGAAALVKQRYPSWNATQIRQHLKNTATNLGNSSQFGSGLVNAEAATR

SEQ ID NO: 67975 - protein, 268 aa, Unidentified
QTVPWGITRVQAPAVHNRGITGSGVRVAILDSGISTHEDLNVRGGVSFVPGETTYADLNGHGTHVAGTVAALNNSIGVVGVAPSADLFAVKVLGANGRGSVSGIAQGLEWAAQNNMHIANMSLGAEGPSSTLERAVNYATSRDVLVIAATGNNGSGSVGYPARYANAMAVGATDQNNRRANFSQYGTGIDIVAPGVNVQSTYPGNRYVSMNGTSMATPHVAGAAALVKQRYPSWNATQIRDHLKNTATNLGNSSQFGSGLVNAEAATR

SEQ ID NO: 67976 - protein, 268 aa, Unidentified
QTVPWGITRVQAPAVHNRGITGSGVRVAILDSGISTHEDLNVRGGVSFVPGETTYADLNGHGTHVAGTVAALNNSIGVVGVAPSADLYAVKVLGANGRGSVSGIAQGLEWAAQNNMNIANMSLGAEGPSSTLERAVNYATSRDVLVIAATGNNGSGSVGYPARYANAMAVGATDQNNRRANFSQYGTGIDIVAPGVNVQSTYPGNRYVSMNGTSMATPHVAGAAALVKQRYPSWNATQIRDHLKNTATNLGNSSQFGSGLVNAEAATR

SEQ ID NO: 67977 - protein, 268 aa, Unidentified
QTVPWGITRVQAPAVHNRGITGSGVRVAILDSGISPHEDLNVRGGVSFVPGETTYADLNGHGTHVAGTVAALDNSIGVVGVAPSADLYAVKVLGANGRGSVSGIAQGLEWAAQNNMHIANMSLGAEGPSSTLERAVNYATSRDVLVIAATGNNGSGSVGYPARYANAMAVGATDQNNRRANFSQYGTGIDIVAPGVNVQSTYPGNRYVSMNGTSMATPHVAGAAALVKQRYPSWNATQIRNHLKNTATNLGNSSQFGSGLVNAEAATR

SEQ ID NO: 67978 - protein, 268 aa, Unidentified
QTVPWGITRVQAPAVHNRGITGSGVRVAILDSGISTHEDLNVRGGVSFVPGEPTTADLNGHGTHVAGTVAALNNSIGVVGVAPSADLYAVKVLGANGRGSVSGIAQGLEWAAPNNMHIANMSLGTDAPSSTLERAVNYATSTDVLVIAATGNNGSGTVGYPARYANAMAVGATDQNNRRANFSQYGTGIDIVAPGVNVQSTYPGNRYVSMKGTSMATPHVAGAAALVKQRYPSWNATQIRDHLKNTATNLGNSSQFGSGLVNAEAATR

SEQ ID NO: 67979 - protein, 268 aa, Unidentified
QTVPWGITRVQAPAVHNRGITGSGVRVAILDSGISTHEDLNVRGGVSFVPGETTYADLNGHGTHVAGTVAALNNSIGVVGVAFSADLYAVKVLGANGRGSVSGIAQGLEWAAQNNMHIANMSLGAEGPSSTLERAVNYATSRDVLVIAATGNNGSGSVGYPARYANAMAVGATDQNNRRANFSQYGTGIDIVAPGVNVQSTYPGNRYVSMNGTSMATPHVAGAAALVKQRYPSWNATQIRDHLKNTATNLGNSSQFGSGLVNAEAATR

SEQ ID NO: 67980 - protein, 268 aa, Unidentified
QTVPWGITRVQAPAVHNRGITGSGVRVAILDSGISTHEDLNVRGGVSFVPGETTYADLNGHGTHVAGTVAALNNSIGVVGVAPSADLYAVKVLGANGRGSVSGIAQGLEWAAQNNMHIANMSLGAEGPSSTLERAVNYAFSRDVLVIAATGNNGSGSVGYPARYANAMAVGATDQNNRRANFSQYGTGIDIVAPGVNVQSTYPGNRYVSMNGTSMATPHVAGAAALVKQRYPSWNATQIRDHLKNTATNLGNSSQFGSGLVNAEAATR

SEQ ID NO: 67981 - protein, 268 aa, Unidentified
QTVPWGITRVQAPAVHNRGITGSGVRVAILDSGISTHEDLNVRGGVSFVPGETTYADLNGHGTHVAGTVAALNNSIGVVGVAPSADLYAVKVLGANGRGSVSGIAQGIEWAAQNNMHIANMSLGAEGPSSTLERAVNYATSRDVLVIAATGNNGSGSVGYPARYANAMAVGATDQNNRRANFSQYGTGIDIVAPGVNVQSTYPGNRYVSMNGTSMATPHVAGAAALVKQRYPSWNATQIRDHLKNTATNLGNSSQFGSGLVNAEAATR

SEQ ID NO: 67982 - protein, 268 aa, Unidentified
QTVPWGITRVQAPAVHNRGITGSGVRVAILDSGISTHEDLNVRGGVSFVPGETTYADLNGHGTHVAGTVAALNNSIGVVGVAPSADLYAVKVLGANGRGSVSGIAQGLEWAAQNNMHIANMSLGAEGPSSTLERAVNYATSQDVLVIAATGNNGSGSVGYPARYANAMAVGATDQNNRRANFSQYGTGIDIVAPGVNVQSTYPGNRYVSMNGTSMATPHVAGAAALVKQRYPSWNATQIRDHLKNTATNLGNSSQFGSGLVNAEAATR

SEQ ID NO: 67983 - protein, 268 aa, Unidentified
QTVPWGITRVQAPAVHNRGITGSGVRVAILDSGISHHEDLNVRGGVSFVPGETTYADLNGHGTHVAGTVAALDNSIGVVGVAPSADLYAVKVLGANGRGSVSGIAQGLEWAAQNNMHIANMSLGAEGPSSTLERAVNYATSRDVLVIAATGNNGSGSVGYPARYANAMAVGATDQNNRRANFSQYGTGIDIVAPGVNVQSTYPGNRYVSMNGTSMATPHVAGAAALVKQRYPSWNATQIRNHLKNTATNLGNSSQFGSGLVNAEAATR

SEQ ID NO: 67984 - protein, 268 aa, Unidentified
QTVPWGITRVQAPAVHNRGITGSGVRVAILDSGISTHEDLNVRGGVSFVPGETTYADLNGHGTHVAGTVAALNNSIGVVGVAPSADLYAVKVLGANGRGSVSGIAQGLEWAAQNNMHIANMSEGAEGPSSTLERAVNYATSRDVLVIAATGNNGSGSVGYPARYANAMAVGATDQNNRRANFSQYGTGIDIVAPGVNVQSTYPGNRYVSMNGTSMATPHVAGAAALVKQRYPSWNATQIRDHLKNTATNLGNSSQFGSGLVNAEAATR

SEQ ID NO: 67985 - protein, 268 aa, Unidentified
QTVPWGITRVQAPAVHNRGITGSGVRVAILDSGISTHEDLNVRGGVSFVPGETTYADLNGHGTHVAGTVAALNNSIGVVGVAPSADLYAVKVLGQNGRGSVSGIAQGLEWAAQNNMHIANMSLGAEGPSSTLERAVNYATSRDVLVIAATGNNGSGSVGYPARYANAMAVGATDQNNRRANFSQYGTGIDIVAPGVNVQSTYPGNRYVSMNGTSMATPHVAGAAALVKQRYPSWNATQIRDHLKNTATNLGNSSQFGSGLVNAEAATR

SEQ ID NO: 67986 - protein, 268 aa, Unidentified
QTVPWGITRVQAPAVHNRGITGSGVRVAILDSGISTHEDLNVRGGVSFVPGETTYADLNGHGTHVAGTVAALNNSIGVVGVAPSADLYAVKVLGANMRGSVSGIAQGLEWAAQNNMHIANMSLGAEGPSSTLERAVNYATSRDVLVIAATGNNGSGSVGYPARYANAMAVGATDQNNRRANFSQYGTGIDIVAPGVNVQSTYPGNRYVSMNGTSMATPHVAGAAALVKQRYPSWNATQIRDHLKNTATNLGNSSQFGSGLVNAEAATR

SEQ ID NO: 67987 - protein, 268 aa, Unidentified
QTVPWGITRVQAPAVHNRGITGSGVRVAILDSGISTHEDLNVRGGVSFVPGETTYADLNGHGTHVAGTVAALNNSIGVVGVAPSVDLYAVKVLGANGRGSVSGIAQGLEWAAQNNMHIANMSLGAEGPSSTLERAVNYATSRDVLVIAATGNNGSGSVGYPARYANAMAVGATDQNNRRANFSQYGTGIDIVAPGVNVQSTYPGNRYVSMNGTSMATPHVAGAAALVKQRYPSWNATQIRDHLKNTATNLGNSSQFGSGLVNAEAATR

SEQ ID NO: 67988 - protein, 268 aa, Unidentified
QTVPWGITRVQAPAVHNRGITGSGVRVAILDSGISTHEDLNVRGGVSFVPGETTYADLNGHGTHVAGTVAALNNSIGVVGVAPSADLYAVKVLGANGRGSVSGIAQGLEWAAQNNMHIANMSLGAEGPSSTLERAVNYATSMDVLVIAATGNNGSGSVGYPARYANAMAVGATDQNNRRANFSQYGTGIDIVAPGVNVQSTYPGNRYVSMNGTSMATPHVAGAAALVKQRYPSWNATQIRDHLKNTATNLGNSSQFGSGLVNAEAATR

SEQ ID NO: 67989 - protein, 268 aa, Unidentified
QTVPWGITRVQAPAVHNRGITGSGVRVAILDSGISTHEDLNVRGGVSFVPGETTYADLNGHGTHVAGTVAALNNSIGVVGVAPSADLYAVKVLGANGRGSVSGIAQGLEWAAQQNMHIANMSLGAEGPSSTLERAVNYATSRDVLVIAATGNNGSGSVGYPARYANAMAVGATDQNNRRANFSQYGTGIDIVAPGVNVQSTYPGNRYVSMNGTSMATPHVAGAAALVKQRYPSWNATQIRDHLKNTATNLGNSSQFGSGLVNAEAATR

SEQ ID NO: 67990 - protein, 268 aa, Unidentified
QTVPWGITRVQAPAVHNRGITGSGVRVAILDSGISTHEDLNVRGGVSFVPGETTYADLNGHGTHVAGTVAALNNSIGVVGVAPSADLYAVKVLGANGRGSVSGIAQGLEWAAQNNMHIANMSLGAEGPSSTLERAVNYAASRDVLVIAATGNNGSGSVGYPARYANAMAVGATDQNNRRANFSQYGTGIDIVAPGVNVQSTYPGNRYVSMNGTSMATPHVAGAAALVKQRYPSWNATQIRDHLKNTATNLGNSSQFGSGLVNAEAATR

SEQ ID NO: 67991 - protein, 268 aa, Unidentified
QTVPWGITRVQAPAVHNRGITGSGVRVAILDSGISTHEDLNVRGGVSFVPGETTYADLNGHGTHVAGTVAALNNSIGVVGVAPNADLYAVKVLGANGRGSVSGIAQGLEWAATNNMHIANMSLGAEGPSSTLERAVNYATSRDVLVIAATGNNGSGSVGYPARYANAMAVGATDQNNRRANFSQYGTGIDIVAPGVNVQSTYPGNRYVSMNGTSMATPHVAGAAALVKQRYPSWNATQIRDHLKNTATNLGNSSQFGSGLVNAEAATR

SEQ ID NO: 67992 - protein, 268 aa, Unidentified
QTVPWGITRVQAPAVHNRGITGSGVRVAILDSGISTHEDLNVRGGVSFVPGETTYADLNGHGTHVAGTVAALNNSIGVVGVAPSADMYAVKVLGANGRGSVSGIAQGLEWAAQNNMHIANMSLGAEGPSSTLERAVNYATSRDVLVIAATGNNGSGSVGYPARYANAMAVGATDQNNRRANFSQYGTGIDIVAPGVNVQSTYPGNRYVSMNGTSMATPHVAGAAALVKQRYPSWNATQIRDHLKNTATNLGNSSQFGSGLVNAEAATR

SEQ ID NO: 67993 - protein, 268 aa, Unidentified
QTVPWGITRVQAPAVHNRGITGSGVRVAILDSGISWHEDLNVRGGVSFVPGETTYADLNGHGTHVAGTVAALDNSIGVVGVAPSADLYAVKVLGANGRGSVSGIAQGLEWAAQNNMHIANMSLGAEGPSSTLERAVNYATSRDVLVIAATGNNGSGSVGYPARYANAMAVGATDQNNRRANFSQYGTGIDIVAPGVNVQSTYPGNRYVSMNGTSMATPHVAGAAALVKQRYPSWNATQIRNHLKNTATNLGNSSQFGSGLVNAEAATR

SEQ ID NO: 67994 - protein, 268 aa, Unidentified
QTVPWGITRVQAPAVHNRGITGSGVRVAILDSGISTHEDLNVRGGVSFVPGEPGTADLNGHGTHVAGTVAALDNSIGVVGVAPSADLYAVKVLGANGRGSISGIAQGLEWAAQNNMHIANMSLGTDAPSSTLERAVNYATSRDVLVIAATGNNGSGTVGYPARYANAMAVGATDQNNRRANFSQYGTGIDIVAPGVNVQSTYPGNRYVSMNGTSMATPHVAGAAALVKQRYPSWNATQIRDHLKNTATNLGNSSQFGSGLVNAEAATR

SEQ ID NO: 67995 - protein, 268 aa, Unidentified
QTVPWGITRVQAPAVHNRGITGSGVRVAILDSGISTHEDLNVRGGVSFVPGETTYADLNGHGTHVAGTVAALNNSIGVVGVAPSADLYAVKVLGANGRGSVSGIAQGLEWAAQHNMHIANMSLGAEGPSSTLERAVNYATSRDVLVIAATGNNGSGSVGYPARYANAMAVGATDQNNRRANFSQYGTGIDIVAPGVNVQSTYPGNRYVSMNGTSMATPHVAGAAALVKQRYPSWNATQIRDHLKNTATNLGNSSQFGSGLVNAEAATR

SEQ ID NO: 67996 - protein, 268 aa, Unidentified
QTVPWGITRVQAPAVHNRGITGSGVRVAILDSGISTHEDLNVRGGVSFVPGETTYADLNGHGTHVAGTVAALNNSIGVVGVAPSADLYAVKVLGANGRGSVSGIAQGLEWAAQNNMHIANMSLGAEGPNSTLERAVNYATSRDVLVIAATGNNGSGSVGYPARYANAMAVGATDQNNRRANFSQYGTGIDIVAPGVNVQSTYPGNRYVSMNGTSMATPHVAGAAALVKQRYPSWNATQIRDHLKNTATNLGNSSQFGSGLVNAEAATR

SEQ ID NO: 67997 - protein, 268 aa, Unidentified
QTVPWGITRVQAPAVHNRGITGSGVRVAILDSGISTHEDLNVRGGVSFVPGETTYADLNGHGTHVAGTVAALNNSIGVVGVAPSADLYAVKVLGANGRGSVSGIAQGLEWAAQNNMHIANMSLGAEGPSSTLERAVNYATSSDVLVIAATGNNGSGSVGYPARYANAMAVGATDQNNRRANFSQYGTGIDIVAPGVNVQSTYPGNRYVSMNGTSMATPHVAGAAALVKQRYPSWNATQIRDHLKNTATNLGNSSQFGSGLVNAEAATR

SEQ ID NO: 67998 - protein, 268 aa, Unidentified
QTVPWGITRVQAPAVHNRGITGSGVRVAILDSGISTHEDLNVRGGVSFVPGETTYADLNGHGTHVAGTVAALNNSIGVVGVAPSADLYAVKVLGANGRGSVSGLAQGLEWAAQNNMHIANMSLGAEGPSSTLERAVNYATSRDVLVIAATGNNGSGSVGYPARYANAMAVGATDQNNRRANFSQYGTGIDIVAPGVNVQSTYPGNRYVSMNGTSMATPHVAGAAALVKQRYPSWNATQIRDHLKNTATNLGNSSQFGSGLVNAEAATR

SEQ ID NO: 67999 - protein, 268 aa, Unidentified
QTVPWGITRVQAPAVHNRGITGSGVRVAILDSGISTHEDLNVRGGVSFVPGETTYADLNGHGTHVAGTVAALNNSIGVVGVAPSADLYAVKVLGANGRGSVSGIAQGLEWAAQNNMHIANMSLGAEGPSSTLERAVNYATARDVLVIAATGNNGSGSVGYPARYANAMAVGATDQNNRRANFSQYGTGIDIVAPGVNVQSTYPGNRYVSMNGTSMATPHVAGAAALVKQRYPSWNATQIRDHLKNTATNLGNSSQFGSGLVNAEAATR

SEQ ID NO: 68000 - protein, 268 aa, Unidentified
QTVPWGITRVQAPAVHNRGITGSGVRVAILDSGISTHEDLNVRGGVSFVPGETTYADLNGHGTHVAGTVAALNNSIGVVGVAPMADLYAVKVLGANGRGSVSGIAQGLEWAAQNNMHIANMSLGAEGPSSTLERAVNYATSRDVLVIAATGNNGSGSVGYPARYANAMAVGATDQNNRRANFSQYGTGIDIVAPGVNVQSTYPGNRYVSMNGTSMATPHVAGAAALVKQRYPSWNATQIRDHLKNTATNLGNSSQFGSGLVNAEAATR

SEQ ID NO: 68001 - protein, 268 aa, Unidentified
QTVPWGITRVQAPAVHNRGITGSGVRVAILDSGISTHEDLNVRGGVSFVPGETTYADLNGHGTHVAGTVAALNNSIGVVGVAPSSDLYAVKVLGANGRGSVSGIAQGLEWAAQNNMHIANMSLGAEGPSSTLERAVNYATSRDVLVIAATGNNGSGSVGYPARYANAMAVGATDQNNRRANFSQYGTGIDIVAPGVNVQSTYPGNRYVSMNGTSMATPHVAGAAALVKQRYPSWNATQIRDHLKNTATNLGNSSQFGSGLVNAEAATR

SEQ ID NO: 68002 - protein, 268 aa, Unidentified
QTVPWGITRVQAPAVHNRGITGSGVRVAILDSGISTHEDLNVRGGVSFVPGETTYADLNGHGTHVAGTVAALNNSIGVVGVAPSADLYAVKVLGANGRGSVSGIVQGLEWAAQNNMHIANMSLGAEGPSSTLERAVNYATSRDVLVIAATGNNGSGSVGYPARYANAMAVGATDQNNRRANFSQYGTGIDIVAPGVNVQSTYPGNRYVSMNGTSMATPHVAGAAALVKQRYPSWNATQIRDHLKNTATNLGNSSQFGSGLVNAEAATR

SEQ ID NO: 68003 - protein, 268 aa, Unidentified
QTVPWGITRVQAPAVHNRGITGSGVRVAILDSGISTHEDLNVRGGVSFVPGETTYADLNGHGTHVAGTVAALDNSIGVVGVAPSADLYAVKVLGANGRGSVSGIAQGLEWAATNNMHIANMSLGADGPSSTLERAVNYATSRDVLVIAATGNNGSGSVGYPARYANAMAVGATDQNNRRANFSQYGTGIDIVAPGVNVQSTYPGNRYVSMNGTSMATPHVAGAAALVKQRYPSWNATQIRDHLKNTATNLGNSSQFGSGLVNAEAATR

SEQ ID NO: 68004 - protein, 268 aa, Unidentified
QTVPWGITRVQAPAVHNRGITGSGVRVAILDSGISTHEDLNVRGGVSFVPGETTYADLNGHGTHVAGTVAALNNSIGVVGVAPSADLYAVKVLGANGRGSVSGIAQGLEWAAQNNMHIANMSLGAEGDSSTLERAVNYATSRDVLVIAATGNNGSGSVGYPARYANAMAVGATDQNNRRANFSQYGTGIDIVAPGVNVQSTYPGNRYVSMNGTSMATPHVAGAAALVKQRYPSWNATQIRDHLKNTATNLGNSSQFGSGLVNAEAATR

SEQ ID NO: 68005 - protein, 268 aa, Unidentified
QTVPWGITRVQAPAVHNRGITGSGVRVAILDSGISTHEDLNVRGGVSFVPGEPTYADLNGHGTHVAGTVAALDNSIGVVGVAPSADLYAVKVLGANGRGSVSGIAQGLEWAAQNNMHIANMSLGTDAPSSTLERAVNYATSADVLVIAATGNNGSGSVGYPARYANAMAVGATDQNNRRANFSQYGTGIDIVAPGVNVQSTYPGNRYVSMNGTSMATPHVAGAAALVKQRYPSWNATQIRDHLKNTATNLGNSSQFGSGLVNAEAATR

SEQ ID NO: 68006 - protein, 268 aa, Unidentified
QTVPWGITRVQAPAVHNRGITGSGVRVAILDSGISTHEDLNVRGGVSFVPGETTYADLNGHGTHVAGTVAALNNSIGVVGVAPSADLYAVKVLGANGRGSVSGIAQGLEWCAQNNMHIANMSLGAEGPSSTLERAVNYATSRDVLVIAATGNNGSGSVGYPARYANAMAVGATDQNNRRANFSQYGTGIDIVAPGVNVQSTYPGNRYVSMNGTSMATPHVAGAAALVKQRYPSWNATQIRDHLKNTATNLGNSSQFGSGLVNAEAATR

SEQ ID NO: 68007 - protein, 268 aa, Unidentified
QTVPWGITRVQAPAVHNRGITGSGVRVAILDSGISDHEDLNVRGGVSFVPGETTYADLNGHGTHVAGTVAALDNSIGVVGVAPSADLYAVKVLGANGRGSVSGIAQGLEWAAQNNMHIANMSLGAEGPSSTLERAVNYATSRDVLVIAATGNNGSGSVGYPARYANAMAVGATDQNNRRANFSQYGTGIDIVAPGVNVQSTYPGNRYVSMNGTSMATPHVAGAAALVKQRYPSWNATQIRNHLKNTATNLGNSSQFGSGLVNAEAATR

SEQ ID NO: 68008 - protein, 268 aa, Unidentified
QTVPWGITRVQAPAVHNRGITGSGVRVAILDSGISTHEDLNVRGGVSFVPGETTYADLNGHGTHVAGTVAALNNDIGVVGVAPSADLYAVKVLGANGRGSVSGIAQGLEWAAQNNMHIANMSLGAEGPSSTLERAVNYATSRDVLVIAATGNNGSGSVGYPARYANAMAVGATDQNNRRANFSQYGTGIDIVAPGVNVQSTYPGNRYVSMNGTSMATPHVAGAAALVKQRYPSWNATQIRDHLKNTATNLGNSSQFGSGLVNAEAATR

SEQ ID NO: 68009 - protein, 268 aa, Unidentified
QTVPWGITRVQAPAVHNRGITGSGVRVAILDSGISTHEDLNVRGGVSFVPGETTYADLNGHGTHVAGTVAALNNSIGVVGVAPNADLYAVKVLGANGRGSVSGIAQGLEWAAQNNMHIANMSLGADGPSSTLERAVNYATSRDVLVIAATGNNGSGSVGYPARYANAMAVGATDQNNRRANFSQYGTGIDIVAPGVNVQSTYPGNRYVSMNGTSMATPHVAGAAALVKQRYPSWNATQIRDHLKNTATNLGNSSQFGSGLVNAEAATR

SEQ ID NO: 68010 - protein, 268 aa, Unidentified
QTVPWGITRVQAPAVHNRGITGSGVRVAILDSGISTHEDLNVRGGVSFVPGETTYADLNGHGTHVAGTVAALNNSIGVVGVAPSADLYAVKVLGANGRGSVSGIAQGLEWAAQANMHIANMSLGAEGPSSTLERAVNYATSRDVLVIAATGNNGSGSVGYPARYANAMAVGATDQNNRRANFSQYGTGIDIVAPGVNVQSTYPGNRYVSMNGTSMATPHVAGAAALVKQRYPSWNATQIRDHLKNTATNLGNSSQFGSGLVNAEAATR

SEQ ID NO: 68011 - protein, 268 aa, Unidentified
QTVPWGITRVQAPAVHNRGITGSGVRVAILDSGISTHEDLNVRGGVSFVPGETTYADLNGHGTHVAGTVAALNNSIGVVGVGPSADLYAVKVLGANGRGSVSGIAQGLEWAAQNNMHIANMSLGAEGPSSTLERAVNYATSRDVLVIAATGNNGSGSVGYPARYANAMAVGATDQNNRRANFSQYGTGIDIVAPGVNVQSTYPGNRYVSMNGTSMATPHVAGAAALVKQRYPSWNATQIRDHLKNTATNLGNSSQFGSGLVNAEAATR

SEQ ID NO: 68012 - protein, 268 aa, Unidentified
QTVPWGITRVQAPAVHNRGITGSGVRVAILDSGISTHEDLNVRGGVSFVPGETTYADLNGHGTHVAGTVAALNNSIGVVGVAPSADLYAVKVLGANGRGSVSGIAQALEWAAQNNMHIANMSLGAEGPSSTLERAVNYATSRDVLVIAATGNNGSGSVGYPARYANAMAVGATDQNNRRANFSQYGTGIDIVAPGVNVQSTYPGNRYVSMNGTSMATPHVAGAAALVKQRYPSWNATQIRDHLKNTATNLGNSSQFGSGLVNAEAATR

SEQ ID NO: 68013 - protein, 268 aa, Unidentified
QTVPWGITRVQAPAVHNRGITGSGVRVAILDSGISGHEDLNVRGGVSFVPGETTYADLNGHGTHVAGTVAALDNSIGVVGVAPSADLYAVKVLGANGRGSVSGIAQGLEWAAQNNMHIANMSLGAEGPSSTLERAVNYATSRDVLVIAATGNNGSGSVGYPARYANAMAVGATDQNNRRANFSQYGTGIDIVAPGVNVQSTYPGNRYVSMNGTSMATPHVAGAAALVKQRYPSWNATQIRNHLKNTATNLGNSSQFGSGLVNAEAATR

SEQ ID NO: 68014 - protein, 268 aa, Unidentified
QTVPWGITRVQAPAVHNRGITGSGVRVAILDSGISTHEDLNVRGGVSFVPGETTYADLNGHGTHVAGTVAALNNSIGVVGVAPSADLYAVKVLGANGRGSVSGIAQGLEWAAQNNMHIANMSLGAEGPSSTLERAVNYAYSRDVLVIAATGNNGSGSVGYPARYANAMAVGATDQNNRRANFSQYGTGIDIVAPGVNVQSTYPGNRYVSMNGTSMATPHVAGAAALVKQRYPSWNATQIRDHLKNTATNLGNSSQFGSGLVNAEAATR

SEQ ID NO: 68015 - protein, 268 aa, Unidentified
QTVPWGITRVQAPAVHNRGITGSGVRVAILDSGISTHEDLNVRGGVSFVPGETTYADLNGHGTHVAGTVAALNNSIGVVGVAPSADLYAVKVLAANGRGSVSGIAQGLEWAAQNNMHIANMSLGAEGPSSTLERAVNYATSRDVLVIAATGNNGSGSVGYPARYANAMAVGATDQNNRRANFSQYGTGIDIVAPGVNVQSTYPGNRYVSMNGTSMATPHVAGAAALVKQRYPSWNATQIRDHLKNTATNLGNSSQFGSGLVNAEAATR

SEQ ID NO: 68016 - protein, 268 aa, Unidentified
QTVPWGITRVQAPAVHNRGITGSGVRVAILDSGISAHSDLNIRGGASFVPGEPTTADLNGHGTHVAGTVAALDNSIGVVGVAPNAELYAVKVLGANGRGSISGIAQGLEWAAQNNMHIANMSLGTDAPSSTLERAVNYATSADVLVIAATGNNGSGSVGYPARYANAMAVGATDQNNRRANFSQYGTGIDIVAPGVNVQSTYPGNRYVSMSGTSMATPHVAGAAALVKQRYPSWNATQIRDHLKNTATNLGNSSQFGSGLVNAEAATR

SEQ ID NO: 68017 - protein, 268 aa, Unidentified
QTVPWGITRVQAPAVHNRGITGSGVRVAILDSGISTHEDLNVRGGVSFVPGETTYADLNGHGTHVAGTVAALNNSIGVVGVAPSADVYAVKVLGANGRGSVSGIAQGLEWAAQNNMHIANMSLGAEGPSSTLERAVNYATSRDVLVIAATGNNGSGSVGYPARYANAMAVGATDQNNRRANFSQYGTGIDIVAPGVNVQSTYPGNRYVSMNGTSMATPHVAGAAALVKQRYPSWNATQIRDHLKNTATNLGNSSQFGSGLVNAEAATR

SEQ ID NO: 68018 - protein, 268 aa, Unidentified
QTVPWGITRVQAPAVHNRGITGSGVRVAILDSGISTHEDLNVRGGVSFVPGETTYADLNGHGTHVAGTVAALNNSIGVVGVAPSADLYAVKVLGANGRGSVSGIAQGLEWAAQNNMHIANMSLGAEGPSSTLERAVNYATSRDVLVIAATGNNGSESVGYPARYANAMAVGATDQNNRRANFSQYGTGIDIVAPGVNVQSTYPGNRYVSMNGTSMATPHVAGAAALVKQRYPSWNATQIRDHLKNTATNLGNSSQFGSGLVNAEAATR

SEQ ID NO: 68019 - protein, 268 aa, Unidentified
QTVPWGITRVQAPAVHNRGITGSGVRVAILDSGISTHEDLNVRGGVSFVPGETTYADLNGHGTHVAGTVAALNNSIGVVGVAPSADLYAVKVLGANGRGSVSGIAQGLEWAAQNNMHIANMSLGAEGPSSTLERAVNYATSADVLVIAATGNNGSGSVGYPARYANAMAVGATDQNNRRANFSQYGTGIDIVAPGVNVQSTYPGNRYVSMNGTSMATPHVAGAAALVKQRYPSWNATQIRDHLKNTATNLGNSSQFGSGLVNAEAATR

SEQ ID NO: 68020 - protein, 268 aa, Unidentified
QTVPWGITRVQAPAVHNRGITGSGVRVAILDSGISQHEDLNVRGGVSFVPGETTYADLNGHGTHVAGTVAALDNSIGVVGVAPSADLYAVKVLGANGRGSVSGIAQGLEWAAQNNMHIANMSLGAEGPSSTLERAVNYATSRDVLVIAATGNNGSGSVGYPARYANAMAVGATDQNNRRANFSQYGTGIDIVAPGVNVQSTYPGNRYVSMNGTSMATPHVAGAAALVKQRYPSWNATQIRNHLKNTATNLGNSSQFGSGLVNAEAATR

SEQ ID NO: 68021 - protein, 268 aa, Unidentified
QTVPWGITRVQAPAVHNRGITGSGVRVAILDSGISNHEDLNVRGGVSFVPGETTYADLNGHGTHVAGTVAALDNSIGVVGVAPSADLYAVKVLGANGRGSVSGIAQGLEWAAQNNMHIANMSLGAEGPSSTLERAVNYATSRDVLVIAATGNNGSGSVGYPARYANAMAVGATDQNNRRANFSQYGTGIDIVAPGVNVQSTYPGNRYVSMNGTSMATPHVAGAAALVKQRYPSWNATQIRNHLKNTATNLGNSSQFGSGLVNAEAATR

SEQ ID NO: 68022 - protein, 268 aa, Unidentified
QTVPWGITRVQAPAVHNRGITGSGVRVAILDSGISTHEDLNVRGGVSFVPGEPGYADLNGHGTHVAGTVAALDNSIGVVGVAPSADLYAVKVLGANGRGSISGIAQGLEWAAQNNMHIANMSLGTDAPSSTLERAVNYATSRDVLVIAATGNNGSGSVGYPARYANAMAVGATDQNNRRANFSQYGTGIDIVAPGVNVQSTYPGNRYVSMNGTSMATPHVAGAAALVKQRYPSWNATQIRDHLKNTATNLGNSSQFGSGLVNAEAATR

SEQ ID NO: 68023 - protein, 268 aa, Unidentified
QTVPWGITRVQAPAVHNRGITGSGVRVAILDSGISTHEDLNVRGGVSFVPGETTYADLNGHGTHVAGTVAALNNSIGVVGVAPSADLYAVKVLGMNGRGSVSGIAQGLEWAAQNNMHIANMSLGAEGPSSTLERAVNYATSRDVLVIAATGNNGSGSVGYPARYANAMAVGATDQNNRRANFSQYGTGIDIVAPGVNVQSTYPGNRYVSMNGTSMATPHVAGAAALVKQRYPSWNATQIRDHLKNTATNLGNSSQFGSGLVNAEAATR

SEQ ID NO: 68024 - protein, 268 aa, Unidentified
QTVPWGITRVQAPTVHNRGITGSGVKVAILDTGIAQHSDLTIRGGASFVPGESTTADLNGHGTHVSGTVAALDNNIGVIGVAPSADLYAVKVLGANGRGSVSGIAQGLEWAATNNMHIANMSLGSDAPSTTLERAVNYATSRGVLVIAATGNNGTGSIGYPARYANAMAVGATDQNNRRASFSQYGTGIDIVAPGVGIQSTYLNNSYASMPGTSMATPHVAGVAALVKQKNPSWNATQIRNHLKNTATNLGNSSQFGSGLVNADAATR

SEQ ID NO: 68025 - protein, 268 aa, Unidentified
QTVPWGITRVQAPAVHNRGITGSGVRVAILDSGISTHEDLNVRGGVSFVPGETTYADLNGHGTHVAGTVAAVNNSIGVVGVAPSADLYAVKVLGANGRGSVSGIAQGLEWAAQNNMHIANMSLGAEGPSSTLERAVNYATSRDVLVIAATGNNGSGSVGYPARYANAMAVGATDQNNRRANFSQYGTGIDIVAPGVNVQSTYPGNRYVSMNGTSMATPHVAGAAALVKQRYPSWNATQIRDHLKNTATNLGNSSQFGSGLVNAEAATR

SEQ ID NO: 68026 - protein, 268 aa, Unidentified
QTVPWGITRVQAPAVHNRGITGSGVRVAILDSGISTHEDLNVRGGVSFVPGETTYADLNGHGTHVAGTVAALNNSIGVVGVAPSADLYAVKVLGANGRGSVSGIAQGLEWAAQNNMHIANMSLGAEGPSSTLERAVDYATSRDVLVIAATGNNGSGSVGYPARYANAMAVGATDQNNRRANFSQYGTGIDIVAPGVNVQSTYPGNRYVSMNGTSMATPHVAGAAALVKQRYPSWNATQIRDHLKNTATNLGNSSQFGSGLVNAEAATR

SEQ ID NO: 68027 - protein, 268 aa, Unidentified
QTVPWGITRVQAPAVHNRGITGSGVRVAILDSGISTHEDLNVRGGVSFVPGETTYADLNGHGTHVAGTVAALNNNIGVVGVAPSADLYAVKVLGANGRGSVSGIAQGLEWAAQNNMHIANMSLGAEGPSSTLERAVNYATSRDVLVIAATGNNGSGSVGYPARYANAMAVGATDQNNRRANFSQYGTGIDIVAPGVNVQSTYPGNRYVSMNGTSMATPHVAGAAALVKQRYPSWNATQIRDHLKNTATNLGNSSQFGSGLVNAEAATR

SEQ ID NO: 68028 - protein, 268 aa, Unidentified
QTVPWGITRVQAPAVHNRGITGSGVRVAILDSGISTHEDLNVRGGVSFVPGETTYADLNGHGTHVAGTVAALNNSIGVVGVAPSADLYAVKVLGANGRGSVSGIAQGLEWAAQNNMHIANMSLGAEGPSSTLERAVNYATSVDVLVIAATGNNGSGSVGYPARYANAMAVGATDQNNRRANFSQYGTGIDIVAPGVNVQSTYPGNRYVSMNGTSMATPHVAGAAALVKQRYPSWNATQIRDHLKNTATNLGNSSQFGSGLVNAEAATR

SEQ ID NO: 68029 - protein, 268 aa, Unidentified
QTVPWGITRVQAPAVHNRGITGSGVRVAILDSGISTHEDLNVRGGVSFVPGETTYADLNGHGTHVAGTVAALNNSIGVVGVAPSADLYAVKVLGANGRGSVSGIAQGLEWAAQENMHIANMSLGAEGPSSTLERAVNYATSRDVLVIAATGNNGSGSVGYPARYANAMAVGATDQNNRRANFSQYGTGIDIVAPGVNVQSTYPGNRYVSMNGTSMATPHVAGAAALVKQRYPSWNATQIRDHLKNTATNLGNSSQFGSGLVNAEAATR

SEQ ID NO: 68030 - protein, 268 aa, Unidentified
QTVPWGITRVQAPAVHNRGITGSGVRVAILDSGISTHEDLNVRGGVSFVPGETTYADLNGHGTHVAGTVAALNNSIGVVGVAPIADLYAVKVLGANGRGSVSGIAQGLEWAAQNNMHIANMSLGAEGPSSTLERAVNYATSRDVLVIAATGNNGSGSVGYPARYANAMAVGATDQNNRRANFSQYGTGIDIVAPGVNVQSTYPGNRYVSMNGTSMATPHVAGAAALVKQRYPSWNATQIRDHLKNTATNLGNSSQFGSGLVNAEAATR

SEQ ID NO: 68031 - protein, 268 aa, Unidentified
QTVPWGITRVQAPAVHNRGITGSGVRVAILDSGISTHEDLNVRGGVSFVPGEPTTADLNGHGTHVAGTVAALDNSIGVIGVAPSADLYAVKVLGANGRGSVSGIAQGLEWAAANNMHIANMSLGTDAPSSTLERAVNYATSRDVLVIAATGNNGSGTVGYPARYANAMAVGATDQNNRRANFSQYGTGIDIVAPGVNVQSTYPGNRYVSMSGTSMATPHVAGAAALVKQRYPSWNATQIRNHLLNTATNLGNSSQFGSGLVNAEAATR

SEQ ID NO: 68032 - protein, 268 aa, Unidentified
QTVPWGITRVQAPAVHNRGITGSGVRVAILDSGISYHEDLNVRGGHSFVPGETTYADLNGHGTHVAGTVAALDNSIGVVGVAPSADLYAVKVLGANGRGSVSGIAQGLEWAAQNNMHIANMSLGAEGPSSTLERAVNYATSRDVLVIAATGNNGSGSVGYPARYANAMAVGATDQNNRRANFSQYGTGIDIVAPGVNVQSTYPGNRYVSMNGTSMATPHVAGAAALVKQRYPSWNATQIRNHLKNTATNLGNSSQFGSGLVNAEAATR

SEQ ID NO: 68033 - protein, 268 aa, Unidentified
QTVPWGITRVQAPAVHNRGITGSGVRVAILDSGISTHEDLNVRGGVSFVPGETTYADLNGHGTHVAGTVAALNNSIGVVGVAPSADLYAVKVLGANGRGSLSGIAQGLEWAAQNNMHIANMSLGAEGPSSTLERAVNYATSRDVLVIAATGNNGSGSVGYPARYANAMAVGATDQNNRRANFSQYGTGIDIVAPGVNVQSTYPGNRYVSMNGTSMATPHVAGAAALVKQRYPSWNATQIRDHLKNTATNLGNSSQFGSGLVNAEAATR

SEQ ID NO: 68034 - protein, 268 aa, Unidentified
QTVPWGITRVQAPAVHNRGITGSGVRVAILDSGISAHEDLNVRGGVSFVPGEPTYADLNGHGTHVAGTVAALNNSIGVVGVAPNADLYAVKVLGANGRGSVSGIAQGLEWAAQNNMHIANMSLGTDFPSSTLERAVNYATSRDVLVIAATGNNGSGSVGYPARYANAMAVGATDQNNRRANFSQYGTGIDIVAPGVNVQSTYPGNRYVSMNGTSMATPHVAGAAALVKQRYPSWNATQIRDHLKNTATNLGNSSQFGSGLVNAEAATR

SEQ ID NO: 68035 - protein, 268 aa, Unidentified
QTVPWGITRVQAPAVHNRGITGSGVRVAILDSGISTHEDLNVRGGVSFVPGETTYADLNGHGTHVAGTVAALNNSIGVVGVAPSADLYAVKVLGANGRGSVSGIAQGLEWAAQNNMHIANMSLGAEGPSSTLERAVNYAHSRDVLVIAATGNNGSGSVGYPARYANAMAVGATDQNNRRANFSQYGTGIDIVAPGVNVQSTYPGNRYVSMNGTSMATPHVAGAAALVKQRYPSWNATQIRDHLKNTATNLGNSSQFGSGLVNAEAATR

SEQ ID NO: 68036 - protein, 268 aa, Unidentified
QTVPWGITRVQAPAVHNRGITGSGVRVAILDSGISTHEDLNVRGGVSFVPGETTYADLNGHGTHVAGTVAALNNSIGVVGVAPSADLYAVKVLGANGRGSVSGIAQGLEWAAQNNMHIANMSLGAEGPSSTLERAVNYAESRDVLVIAATGNNGSGSVGYPARYANAMAVGATDQNNRRANFSQYGTGIDIVAPGVNVQSTYPGNRYVSMNGTSMATPHVAGAAALVKQRYPSWNATQIRDHLKNTATNLGNSSQFGSGLVNAEAATR

SEQ ID NO: 68037 - protein, 268 aa, Unidentified
QTVPWGITRVQAPAVHNRGITGSGVRVAILDSGISTHEDLNVRGGVSFVPGETTYADLNGHGTHVAGTVAALNNSIGVVGVAPSADLYAIKVLGANGRGSVSGIAQGLEWAAQNNMHIANMSLGAEGPSSTLERAVNYATSRDVLVIAATGNNGSGSVGYPARYANAMAVGATDQNNRRANFSQYGTGIDIVAPGVNVQSTYPGNRYVSMNGTSMATPHVAGAAALVKQRYPSWNATQIRDHLKNTATNLGNSSQFGSGLVNAEAATR

SEQ ID NO: 68038 - protein, 268 aa, Unidentified
QTVPWGITRVQAPAVHNRGITGSGVRVAILDSGISTHEDLNVRGGVSFVPGETTYADLNGHGTHVAGTVAALNNSIGVVGVAPSIDLYAVKVLGANGRGSVSGIAQGLEWAAQNNMHIANMSLGAEGPSSTLERAVNYATSRDVLVIAATGNNGSGSVGYPARYANAMAVGATDQNNRRANFSQYGTGIDIVAPGVNVQSTYPGNRYVSMNGTSMATPHVAGAAALVKQRYPSWNATQIRDHLKNTATNLGNSSQFGSGLVNAEAATR

SEQ ID NO: 68039 - protein, 268 aa, Unidentified
QTVPWGITRVQAPAVHNRGITGSGVRVAILDSGISCHEDLNVRGGVSFVPGETTYADLNGHGTHVAGTVAALDNSIGVVGVAPSADLYAVKVLGANGRGSVSGIAQGLEWAAQNNMHIANMSLGAEGPSSTLERAVNYATSRDVLVIAATGNNGSGSVGYPARYANAMAVGATDQNNRRANFSQYGTGIDIVAPGVNVQSTYPGNRYVSMNGTSMATPHVAGAAALVKQRYPSWNATQIRNHLKNTATNLGNSSQFGSGLVNAEAATR

SEQ ID NO: 68040 - protein, 268 aa, Unidentified
QTVPWGITRVQAPAVHNRGITGSGVRVAILDSGISTHEDLNVRGGVSFVPGETTYADLNGHGTHVAGTVAALNNSIGVVGVAPSADLYAVKVLNANGRGSVSGIAQGLEWAAQNNMHIANMSLGAEGPSSTLERAVNYATSRDVLVIAATGNNGSGSVGYPARYANAMAVGATDQNNRRANFSQYGTGIDIVAPGVNVQSTYPGNRYVSMNGTSMATPHVAGAAALVKQRYPSWNATQIRDHLKNTATNLGNSSQFGSGLVNAEAATR

SEQ ID NO: 68041 - protein, 268 aa, Unidentified
QTVPWGITRVQAPAVHNRGITGSGVRVAILDSGISTHEDLNVRGGVSFVPGETTYADLNGHGTHVAGTVAALNNSIGVVGVAPSADLYAVKVLGANGRGSVSGIAQGLEWAAQNNMHIANMSLGAEGPSSTLERAVNYATSKDVLVIAATGNNGSGSVGYPARYANAMAVGATDQNNRRANFSQYGTGIDIVAPGVNVQSTYPGNRYVSMNGTSMATPHVAGAAALVKQRYPSWNATQIRDHLKNTATNLGNSSQFGSGLVNAEAATR

SEQ ID NO: 68042 - protein, 268 aa, Unidentified
QTVPWGITRVQAPAVHNRGITGSGVRVAILDSGISTHEDLNVRGGVSFVPGETTYADLNGHGTHVAGTVAALNNSIGVVGVAESADLYAVKVLGANGRGSVSGIAQGLEWAAQNNMHIANMSLGAEGPSSTLERAVNYATSRDVLVIAATGNNGSGSVGYPARYANAMAVGATDQNNRRANFSQYGTGIDIVAPGVNVQSTYPGNRYVSMNGTSMATPHVAGAAALVKQRYPSWNATQIRDHLKNTATNLGNSSQFGSGLVNAEAATR

SEQ ID NO: 68043 - protein, 268 aa, Unidentified
QTVPWGITRVQAPAVHNRGITGSGVRVAILDSGISTHEDLNVRGGVSFVPGETTYADLNGHGTHVAGTVAALNNSIGVIGVAPNADLYAVKVLGANGRGSVSGIAQGLEWAAQNNMHIANMSLGAEGPSSTLERAVNYATSRDVLVIAATGNNGSGSVGYPARYANAMAVGATDQNNRRANFSQYGTGIDIVAPGVNVQSTYPGNRYVSMNGTSMATPHVAGAAALVKQRYPSWNATQIRDHLKNTATNLGNSSQFGSGLVNAEAATR

SEQ ID NO: 68044 - protein, 268 aa, Unidentified
QTVPWGITRVQAPAVHNRGITGSGVRVAILDSGISTHEDLNVRGGVSFVPGETTYADLNGHGTHVAGTVAALNNSIGVVGVAPSADLYAVKVLGANGRGSVSGIAQGLEWAAQNNIHIANMSLGAEGPSSTLERAVNYATSRDVLVIAATGNNGSGSVGYPARYANAMAVGATDQNNRRANFSQYGTGIDIVAPGVNVQSTYPGNRYVSMNGTSMATPHVAGAAALVKQRYPSWNATQIRDHLKNTATNLGNSSQFGSGLVNAEAATR

SEQ ID NO: 68045 - protein, 268 aa, Unidentified
QTVPWGITRVQAPAVHNRGITGSGVRVAILDSGISTHEDLNVRGGVSFVPGETTYADLNGHGTHVAGTVAALNNSIGVVGVAPSADLYAVKVLGANGRGSVSGIAQGLEWAAQNNMHIANMSLGAEGPSSTLERAVNYATERDVLVIAATGNNGSGSVGYPARYANAMAVGATDQNNRRANFSQYGTGIDIVAPGVNVQSTYPGNRYVSMNGTSMATPHVAGAAALVKQRYPSWNATQIRDHLKNTATNLGNSSQFGSGLVNAEAATR

SEQ ID NO: 68046 - protein, 268 aa, Unidentified
QTVPWGITRVQAPAVHNRGITGSGVRVAILDSGISAHEDLNVRGGVSFVPGETTYADLNGHGTHVAGTVAALNNSIGVVGVAPSADLYAVKVLGANGRGSVSGIAQGLEWAAQNNMHIANMSLGAEGPSSTLERAVNYATSRDVLVIAATGNNGSGSVGYPARYANAMAVGATDQNNRRANFSQYGTGIDIVAPGVNVQSTYPGNRYVSMNGTSMATPHVAGAAALVKQRYPSWNATQIRDHLKNTATNLGNSSQFGSGLVNAEAATR

SEQ ID NO: 68047 - protein, 268 aa, Unidentified
QTVPWGITRVQAPAVHNRGITGSGVRVAILDSGISTHEDLNVRGGVSFVPGETTYADLNGHGTHVAGTVAALNNSIGVVGVAPSADLYAVKVLGANGRGSVSGIAQGLEWAAQNNMHIANMSLGAEGPSSTLERAVNYATSHDVLVIAATGNNGSGSVGYPARYANAMAVGATDQNNRRANFSQYGTGIDIVAPGVNVQSTYPGNRYVSMNGTSMATPHVAGAAALVKQRYPSWNATQIRDHLKNTATNLGNSSQFGSGLVNAEAATR

SEQ ID NO: 68048 - protein, 268 aa, Unidentified
QTVPWGITRVQAPAVHNRGITGSGVRVAILDSGISTHEDLNVRGGVSFVPGEPTTADLNGHGTHVAGTVAALDNSIGVIGVAPSADLYAVKVLGANGRGSVSGIAQGLEWAAANNMHIANMSLGTDAPSSTLERAVNYATSRDVLVIAATGNNGSGTVGYPARYANAMAVGATDQNNRRANFSQYGTGIDIVAPGVNVQSTYPGNRYVSMSGTSMATPHVAGAAALVKQRYPSWNATQIRQHLKNTATNLGNSSQFGSGLVNAEAATR

SEQ ID NO: 68049 - protein, 268 aa, Unidentified
QTVPWGITRVQAPAVHNRGITGSGVRVAILDSGISTHEDLNVRGGVSFVPGETTYADLNGHGTHVAGTVAALNNSIGVVGVAPSADLYAVKVLGANGRGSVSGIAEGLEWAAQNNMHIANMSLGAEGPSSTLERAVNYATSRDVLVIAATGNNGSGSVGYPARYANAMAVGATDQNNRRANFSQYGTGIDIVAPGVNVQSTYPGNRYVSMNGTSMATPHVAGAAALVKQRYPSWNATQIRDHLKNTATNLGNSSQFGSGLVNAEAATR

SEQ ID NO: 68050 - protein, 268 aa, Unidentified
QTVPWGITRVQAPAVHNRGITGSGVRVAILDSGISTHEDLNVRGGVSFVPGETTYADLNGHGTHVAGTVAALNNSIGVVGVAPSADLYAVKVLGANGRGSVSGIAQGLEWAAQNNMHIANMSQGAEGPSSTLERAVNYATSRDVLVIAATGNNGSGSVGYPARYANAMAVGATDQNNRRANFSQYGTGIDIVAPGVNVQSTYPGNRYVSMNGTSMATPHVAGAAALVKQRYPSWNATQIRDHLKNTATNLGNSSQFGSGLVNAEAATR

SEQ ID NO: 68051 - protein, 268 aa, Unidentified
QTVPWGITRVQAPAVHNRGITGSGVRVAILDSGISTHEDLNVRGGVSFVPGETTYADLNGHGTHVAGTVAALNNHIGVVGVAPSADLYAVKVLGANGRGSVSGIAQGLEWAAQNNMHIANMSLGAEGPSSTLERAVNYATSRDVLVIAATGNNGSGSVGYPARYANAMAVGATDQNNRRANFSQYGTGIDIVAPGVNVQSTYPGNRYVSMNGTSMATPHVAGAAALVKQRYPSWNATQIRDHLKNTATNLGNSSQFGSGLVNAEAATR

SEQ ID NO: 68052 - protein, 268 aa, Unidentified
QTVPWGITRVQAPAVHNRGITGSGVRVAILDSGISTHEDLNVRGGVSFVPGETTYADLNGHGTHVAGTVAALNNSIGVVGVAPSADLYAVKVLGANGRGSVSGIAQGLEWAAQNNMHIANMSLGAEGPSSTLERAVNYATDRDVLVIAATGNNGSGSVGYPARYANAMAVGATDQNNRRANFSQYGTGIDIVAPGVNVQSTYPGNRYVSMNGTSMATPHVAGAAALVKQRYPSWNATQIRDHLKNTATNLGNSSQFGSGLVNAEAATR

SEQ ID NO: 68053 - protein, 268 aa, Unidentified
QTVPWGITRVQAPAVHNRGITGSGVRVAILDSGISTHEDLNVRGGVSFVPGETTYADLNGHGTHVAGTVAALNNSIGVVGVAPSTDLYAVKVLGANGRGSVSGIAQGLEWAAQNNMHIANMSLGAEGPSSTLERAVNYATSRDVLVIAATGNNGSGSVGYPARYANAMAVGATDQNNRRANFSQYGTGIDIVAPGVNVQSTYPGNRYVSMNGTSMATPHVAGAAALVKQRYPSWNATQIRDHLKNTATNLGNSSQFGSGLVNAEAATR

SEQ ID NO: 68054 - protein, 268 aa, Unidentified
QTVPWGITRVQAPAVHNRGITGSGVRVAILDSGISTHEDLNVRGGVSFVPGETTYADLNGHGTHVAGTVAALNNSIGVVGVAPNADLYAVKVLGANGRGSVSGIAQGLEWAAQNNMHIANMSLGAEGPSSTLERAVNYATSRDVLVIAATGNNGSGSVGYPARYANAMAVGATDQNNRRANFSQYGTGIDIVAPGVNVQSTYPGNRYVSMNGTSMATPHVAGAAALVKQRYPSWNATQIRDHLKNTATNLGNSSQFGSGLVNAEAATR

SEQ ID NO: 68055 - protein, 268 aa, Unidentified
QTVPWGITRVQAPAVHNRGITGSGVRVAILDSGISTHEDLNVRGGVSFVPGETTYADLNGHGTHVAGTVAALNNSIGVVGVAPSADLYAVKVLGANGRGSVSGIAQGLEWAAQNNMHIANMSLGAEGPSSTLERAVNYATSEDVLVIAATGNNGSGSVGYPARYANAMAVGATDQNNRRANFSQYGTGIDIVAPGVNVQSTYPGNRYVSMNGTSMATPHVAGAAALVKQRYPSWNATQIRDHLKNTATNLGNSSQFGSGLVNAEAATR

SEQ ID NO: 68056 - protein, 268 aa, Unidentified
QTVPWGITRVQAPAVHNRGITGSGVRVAILDSGISTHEDLNVRGGVSFVPGETTYADLNGHGTHVAGTVAALNNSIGVVGVAPSADLYAVKVLGANGRGSVSGIAQGLEWAAQNNMAIANMSLGAEGPSSTLERAVNYATSRDVLVIAATGNNGSGSVGYPARYANAMAVGATDQNNRRANFSQYGTGIDIVAPGVNVQSTYPGNRYVSMNGTSMATPHVAGAAALVKQRYPSWNATQIRDHLKNTATNLGNSSQFGSGLVNAEAATR

SEQ ID NO: 68057 - protein, 268 aa, Unidentified
QTVPWGITRVQAPAVHNRGITGSGVRVAILDSGISTHEDLNVRGGVSFVPGETTYADLNGHGTHVAGTVAALNNSIGVVGVAPSADLYAVKVLSANGRGSVSGIAQGLEWAAQNNMHIANMSLGAEGPSSTLERAVNYATSRDVLVIAATGNNGSGSVGYPARYANAMAVGATDQNNRRANFSQYGTGIDIVAPGVNVQSTYPGNRYVSMNGTSMATPHVAGAAALVKQRYPSWNATQIRDHLKNTATNLGNSSQFGSGLVNAEAATR

SEQ ID NO: 68058 - protein, 268 aa, Unidentified
QTVPWGITRVQAPTVHNRGITGSGVKVAILDTGIAQHSDLTIRGGASFVPGESTTADLNGHGTHVSGTVAALDNNIGVIGVAPSADLYAVKVLGANGRGSVSGIAQGLEWAATNNMHIANMSLGSDAPSTTLERAVNYATSRGVLVIAATGNNGTGSIGYPARYANAMAVGATDQNNRRASFSQYGTGIDIVAPGVGIQSTYLNNSYASMPGTSMATPHVAGVAALVKQKNPSWNATQIRNHLKNTATNLGPSSQFGSGLVNADAATR

SEQ ID NO: 68059 - protein, 268 aa, Unidentified
QTVPWGITRVQAPAVHNRGITGSGVRVAILDSGISTHEDLNVRGGVSFVPGETTYADLNGHGTHVAGTVAALNNSIGVVGVAPSADLYAVKVLGANGRGSVSGIAQGLEWAAQNNMHIANMSLGAEGPSSTLERAVNYATSRDVLVIAATGNNGSDSVGYPARYANAMAVGATDQNNRRANFSQYGTGIDIVAPGVNVQSTYPGNRYVSMNGTSMATPHVAGAAALVKQRYPSWNATQIRDHLKNTATNLGNSSQFGSGLVNAEAATR

SEQ ID NO: 68060 - protein, 268 aa, Unidentified
QTVPWGITRVQAPAVHNRGITGSGVRVAILDSGISAHSDLNIRGGASFVPGEPTTADLNGHGTHVAGTVAALDNSIGVIGVAPNAELYAVKVLGANGRGSISGIAQGLEWAATNNMHIANMSLGTDAPSSTLERAVNYATSADVLVIAATGNNGSGTVGYPARYANAMAVGATDQNNRRANFSQYGTGIDIVAPGVNVQSTYPGNRYVSMSGTSMATPHVAGAAALVKQRYPSWNATQIRNHLKNTATNLGNSSQFGSGLVNAEAATR

SEQ ID NO: 68061 - protein, 268 aa, Unidentified
QTVPWGITRVQAPAVHNRGITGSGVRVAILDSGISTHEDLNVRGGVSFVPGETTYADLNGHGTHVAGTVAALNNTIGVVGVAPSADLYAVKVLGANGRGSVSGIAQGLEWAAQNNMHIANMSLGAEGPSSTLERAVNYATSRDVLVIAATGNNGSGSVGYPARYANAMAVGATDQNNRRANFSQYGTGIDIVAPGVNVQSTYPGNRYVSMNGTSMATPHVAGAAALVKQRYPSWNATQIRDHLKNTATNLGNSSQFGSGLVNAEAATR

SEQ ID NO: 68062 - protein, 268 aa, Unidentified
QTVPWGITRVQAPAVHNRGITGSGVRVAILDSGISTHEDLNVRGGVSFVPGETTYADLNGHGTHVAGTVAALNNSIGVVGVAPSADLYAVKVLGANGRGSVSGIAQGLEWAAQNNMHIANMSLGAEGPSSTLERAVNYATSRDVLVIAATGNNGSCSVGYPARYANAMAVGATDQNNRRANFSQYGTGIDIVAPGVNVQSTYPGNRYVSMNGTSMATPHVAGAAALVKQRYPSWNATQIRDHLKNTATNLGNSSQFGSGLVNAEAATR

SEQ ID NO: 68063 - protein, 268 aa, Unidentified
QTVPWGITRVQAPAVHNRGITGSGVRVAILDSGISTHEDLNVRGGVSFVPGETTYADLNGHGTHVAGTVAALNNSIGVVGVAPSADLYAVKVLGANGRGSVSGIIQGLEWAAQNNMHIANMSLGAEGPSSTLERAVNYATSRDVLVIAATGNNGSGSVGYPARYANAMAVGATDQNNRRANFSQYGTGIDIVAPGVNVQSTYPGNRYVSMNGTSMATPHVAGAAALVKQRYPSWNATQIRDHLKNTATNLGNSSQFGSGLVNAEAATR

SEQ ID NO: 68064 - protein, 268 aa, Unidentified
QTVPWGITRVQAPAVHNRGITGSGVRVAILDSGISTHEDLNVRGGVSFVPGETTYADLNGHGTHVAGTVAALNNSIGVVGVAPSADLYAVKVLGANGRGSVSGIAQGLEWAAQNNMHIANMSLGAEGHSSTLERAVNYATSRDVLVIAATGNNGSGSVGYPARYANAMAVGATDQNNRRANFSQYGTGIDIVAPGVNVQSTYPGNRYVSMNGTSMATPHVAGAAALVKQRYPSWNATQIRDHLKNTATNLGNSSQFGSGLVNAEAATR

SEQ ID NO: 68065 - protein, 268 aa, Unidentified
QTVPWGITRVQAPAVHNRGITGSGVRVAILDSGISTHEDLNVRGGVSFVPGETTYADLNGHGTHVAGTVAALNNSIGVVGVAPSADLYAVKVLGANGRGSVSGIAQGLEWAAQNNMHIANMSLGAEGPSSTLERAVEYATSRDVLVIAATGNNGSGSVGYPARYANAMAVGATDQNNRRANFSQYGTGIDIVAPGVNVQSTYPGNRYVSMNGTSMATPHVAGAAALVKQRYPSWNATQIRDHLKNTATNLGNSSQFGSGLVNAEAATR

SEQ ID NO: 68066 - protein, 268 aa, Unidentified
QTVPWGITRVQAPAVHNRGITGSGVRVAILDSGISTHEDLNVRGGVSFVPGEPGTADLNGHGTHVAGTVAALDNSIGVVGVAPSADLYAVKVLGANGRGSVSGIAQGLEWAAQNNMHIANMSLGTDAPSSTLERAVNYATSADVLVIAATGNNGSGTVGYPARYANAMAVGATDQNNRRANFSQYGTGIDIVAPGVNVQSTYPGNRYVSMSGTSMATPHVAGAAALVKQRYPSWNATQIRNHLKNTATNLGNSSQFGSGLVNAEAATR

SEQ ID NO: 68067 - protein, 268 aa, Unidentified
QTVPWGITRVQAPAVHNRGITGSGVRVAILDSGISVHEDLNVRGGVSFVPGETTYADLNGHGTHVAGTVAALDNSIGVVGVAPSADLYAVKVLGANGRGSVSGIAQGLEWAAQNNMHIANMSLGAEGPSSTLERAVNYATSRDVLVIAATGNNGSGSVGYPARYANAMAVGATDQNNRRANFSQYGTGIDIVAPGVNVQSTYPGNRYVSMNGTSMATPHVAGAAALVKQRYPSWNATQIRNHLKNTATNLGNSSQFGSGLVNAEAATR

SEQ ID NO: 68068 - protein, 268 aa, Unidentified
QTVPWGITRVQAPAVHNRGITGSGVRVAILDSGISTHEDLNVRGGVSFVPGETTYADLNGHGTHVAGTVAALNNSIGVVGVAPSADLWAVKVLGANGRGSVSGIAQGLEWAAQNNMHIANMSLGAEGPSSTLERAVNYATSRDVLVIAATGNNGSGSVGYPARYANAMAVGATDQNNRRANFSQYGTGIDIVAPGVNVQSTYPGNRYVSMNGTSMATPHVAGAAALVKQRYPSWNATQIRDHLKNTATNLGNSSQFGSGLVNAEAATR

SEQ ID NO: 68069 - protein, 268 aa, Unidentified
QTVPWGITRVQAPAVHNRGITGSGVRVAILDSGISTHEDLNVRGGVSFVPGETTYADLNGHGTHVAGTVAALNNSIGVVGVADSADLYAVKVLGANGRGSVSGIAQGLEWAAQNNMHIANMSLGAEGPSSTLERAVNYATSRDVLVIAATGNNGSGSVGYPARYANAMAVGATDQNNRRANFSQYGTGIDIVAPGVNVQSTYPGNRYVSMNGTSMATPHVAGAAALVKQRYPSWNATQIRDHLKNTATNLGNSSQFGSGLVNAEAATR

SEQ ID NO: 68070 - protein, 204 aa, Unidentified
GISTHEDLNVRGGVSHVAGTVAALNNSIGVVGVAPSADLYAVKVLGANGRGSVSGIAQGLEWAPSSTLERAVNYATSRDVLVIAATGNNGSGSVGYPARYANAMAVGATDQNNRRANFSQYGTGIDIVAPGVNVQSTYPGNRYVSMNGTSMATPHVAGAAALVKQRYPSWNATQIRDHLKNTATNLGNSSQFGSGLVNAEAATR

SEQ ID NO: 68071 - protein, 357 aa, Unidentified
FGIKAEAEEDEEKDKYRARLTLSSSIDNMLNFIEFIPISFSPAKREKFFKEIEKYLEYSIPEKTEDLKKRVKRVKKGERRNFLESWEEVEVTYNVTTETGNLLANGLFVKNSGVKVAVLDTGISTHPDLNIRGGASFVPGEPSTQDGNGHGTHVAGTIAALNNSIGVLGVAPSAELYAVKVLGASGSGSVSSIAQGLEWAGNNGMHVANLSLGSPSPSATLEQAVNSATSRGVLVVAASGNSGAGSISYPARYANAMAVGATDQNNNRASFSQYGAGLDIVAPGVNVQSTYPGSTYASLNGTSMATPHVAGAAALVKQKNPSWSNVQIRNHLKNTATSLGSTNLYGSGLVNAEAATR

SEQ ID NO: 68072 - protein, 267 aa, Unidentified
QTVPWGITRVQAPAVHNRGITGSGVRVAILDSGISTHEDLTVGGVSFVPGEPTTADLNGHGTHVAGTVAALDNSIGVVGVAPSADLYAVKVLGANGRGSISGIAQGLEWAATNNMHIANMSLGTDAPSSTLERAVNYATSRDVLVIAATGNNGSGTVSYPARYANAMAVGATDQNNRRANFSQYGTGIDIVAPGVNVQSTYPGNRYVSMNGTSMATPHVAGAAALVKQRYPSWNATQIRDHLKNTATNLGNSSQFGSGLVNAEAATR

SEQ ID NO: 68073 - protein, 348 aa, Unidentified
ALAQTLGVTRGSVNKYLRELRESGHIEKQIEGSNRSLDENRTVQYVAADFEGSVYATLRGEPSSVTVEDVERREYDGPVYDLTVSENAPNFAVNGGAVVHNSSGVKVAVLDTGISTHPDLNIRGGASFVPGEPSTQDGNGHGTHVAGTIAALNNSIGVLGVAPSAELYAVKVLGASGSGSVSSIAQGLEWAGNNGMHVANLSLGSPSPSATLEQAVNSATSRGVLVVAASGNSGAGSISYPARYANAMAVGATDQNNNRASFSQYGAGLDIVAPGVNVQSTYPGSTYASLNGTSMATPHVAGAAALVKQKNPSWSNVQIRNHLKNTATSLGSTNLYGSGLVNAEAATR

SEQ ID NO: 68074 - protein, 268 aa, Unidentified
QTVPWGITRVQAPAVHNRGITGSGVRVAILDSGISTHEDLTVSGGVSFVPGEPTTADLNGHGTHVAGTVAALDNSIGVVGVAPSADLYAVKVLGANGRGSISGIAQGLEWAATNNMHIANMSLGTDAPSSTLERAVNYATSRDVLVIAATGNNGSGTVSYPARYANAMAVGATDQNNRRANFSQYGTGIDIVAPGVNVQSTYPGNRYVSMNGTSMATPHVAGAAALVKQRYPSWNATQIRDHLKNTATNLGNSSQFGSGLVNAEAATR

SEQ ID NO: 68075 - protein, 268 aa, Unidentified
QTVPWGITRVQAPAVHNRGITGSGVRVAILDSGISTHEDLNVRGGVSFVPGEPTTADLNGHGTHVAGTVAALDNSIGVIGVAPSADLYAVKVLGANGRGSVSGIAQGLEWAAANNMHIANMSLGTDAPSSTLERAVNYATSRDVLVIAATGNNGSGTVGYPARYANAMAVGATDQNNRRANFSQYGTGIDIVAPGVNVQSTYPGNRYVSMSGTSMATPHVAGAAALVKQRYPSWNATQIRQHLLNTATNLGNSSQFGSGLVNAEAATR

SEQ ID NO: 68076 - protein, 268 aa, Unidentified
QTVPWGITRVQAPAVHNRGITGSGVRVAILDSGISTHEDLNVRGGVSFVPGEPTTADLNGHGTHVAGTVAALDNSIGVVGVAPSADLYAVKVLGANGRGSVSGIAQGLEWAAANNMHIANMSLGTDAPSSTLERAVNYATSRDVLVIAATGNNGSGTVGYPARYANAMAVGATDQNNRRANFSQYGTGIDIVAPGVNVQSTYPGNRYVSMSGTSMATPHVAGAAALVKQRYPSWNATQIRQHLLNTATNLGNSSQFGSGLVNAEAATR

SEQ ID NO: 68077 - protein, 360 aa, Unidentified
EIKKSFIDGIFNGKDAKVFVSKELAEDVIFLLLQIKENATINKKSINDIEVYEVRRITNIYTNRKLEKLINSDFIFLKIKEINKVEPTSGYAYDLTVPNAENFVAGFGGFVLHNSGVKVAVLDTGISTHPDLNIRGGASFVPGEPSTQDGNGHGTHVAGTIAALNNSIGVLGVAPSAELYAVKVLGASGSGSVSSIAQGLEWAGNNGMHVANLSLGSPSPSATLEQAVNSATSRGVLVVAASGNSGAGSISYPARYANAMAVGATDQNNNRASFSQYGAGLDIVAPGVNVQSTYPGSTYASLNGTSMATPHVAGAAALVKQKNPSWSNVQIRNHLKNTATSLGSTNLYGSGLVNAEAATR

SEQ ID NO: 68078 - protein, 184 aa, Unidentified
ASFGNGHGTHVAGTIAALDNSIGVLGVAPRAELYAVKVLGASGSGSVSSIAQGVANLSLGLQAPSATLEQAVNSATSRGVLVVAASGNSGAGSISYPARDQNNNRASFSQYGAGLDIVAPGVNVQSTYPGSTYASLNGTSMATPHVAGAWSNVQIRNHLKNTATSLGSTNLYGSGLVNAEAATR

SEQ ID NO: 68079 - protein, 247 aa, Unidentified
AQTVPWGISIKAPAVHSQGYTGSGVKVAVLDTGIASSHPDLVGGASFVPSEPYQDGNGHGTHVAGTIAALNNSIGVLGVAPSADLYAVKVLAGSGSYSIAQGIEWAINNMDVINMSLGGPSGSTTLAVDAASGVVVVAAAGNSGSGTVGYPARYASVIAVGAVDSNNNRASFSSGSELDVMAPGVIQSTLPGNYGSYNGTSMASPHVAGAAALVKSKYPSWTNQIRNRLNTATLGSFYYGGLINVAA

SEQ ID NO: 68080 - protein, 273 aa, Bacillus sp.
AQTVPWGIPHIKADKAHAAGVTGSGVKVAILDTGIDANHADLNVKGGASFVSGEPNALQDGNGHGTHVAGTVAALDNSIGVLGVAPNAELYAVKVLGASGSGSVSSIAQGLEWAGNNGMHVANLSLGSPSPSATLEQAVNSATSRGVLVVAAAGNSGTSGNRNTMDYPARYSSVIAVGAVSSNNTRASFSSVGSELEVMAPGVNILSTYPGSTYATLNGTSMATPHVAGAAALIKAKYPSMTNVQIRNRLKNTATNLGDPFFYGKGVINVESA

SEQ ID NO: 68081 - protein, 161 aa, Unidentified
AQTVPWGIIAPVHSGGGVKVAVLDTGIASHPDLRIGGASFSEPSYQDNGHGTHVAGTAALNNSGVLGVAPNVLYAVKVLDRNGSGSSIAQGIEWAINGMDVVNMSLGGPGSTALQAADNAYNRGVLLAAAGNTGSGISYPARYSVMAVGAVDSNNNRASFS

SEQ ID NO: 68082 - protein, 272 aa, Bacillus sp.
QTVPWGIPHIKADKAHAAGVTGSGVKVAILDTGIDANHADLNVKGGASFVSGEPNALQDGNGHGTHVAGTVAALDNSIGVLGVAPNAELYAVKVLGASGSGSVSSIAQGLEWAGNNGMHVANLSLGSPSPSATLEQAVNSATSRGVLVVAAAGNSGTSGNRNTMDYPARYSSVIAVGAVSSNNTRASFSSVGSELEVMAPGVNILSTYPGSTYATLNGTSMATPHVAGAAALIKAKYPSMTNVQIRNRLKNTATNLGDPFFYGKGVINVESA

SEQ ID NO: 68083 - protein, 272 aa, Bacillus sp.
QTVPWGIPHIKADKAHAAGVTGSGVKVAILDTGIDANHADLNVKGGASFVSGEPNALQDGNGHGTHVAGTVAALDNSIGVLGVAPSVSLYAVKVLGASGSGSVSSIAQGLEWAGNNGMHVANLSLGSPSPSATLEQAVNSATSRGVLVVAAAGNSGTSGNRNTMDYPARYSSVIAVGAVSSNNTRASFSSVGSELEVMAPGVNILSTYPGSTYATLNGTSMATPHVAGAAALIKAKYPSMTNVQIRNRLKNTATNLGDPFFYGKGVINVESA

SEQ ID NO: 68084 - protein, 272 aa, Bacillus sp.
QTVPWGIPHIKADKAHAAGVTGSGVKVAILDTGIDANHADLNVKGGASFVSGEPNALQDGNGHGTHVAGTVAALDNSIGVLGVAPNAELYAVKVLGASGSGSVSSIAQGLEWAGNNGMHVANLSLGSPSPSATLEQAVNSATSRGVLVVAAAGNSGTSGNRNTMDYPARYSSVIAVGAVSSNNTRASFSSVGSELEVMAPGVNILSTYPGSTYATLNGTSMAAPHVAGAAALIKAKYPSMTNVQIRNRLKNTATNLGDPFFYGKGVINVESA

SEQ ID NO: 68085 - protein, 268 aa, Unidentified
QTVPWGIAQVQAPQAHELGHSGSGTKVAVLDTGIAEHADLFIHGGASFVAGEPDYHDLNGHGTHVAGTIAALNDGAGVIGVAPDAELYAVKVLGASGSGSVSSIAQGLEWAGDNGMDVANLSLGSPVGSDTLEQAVNYATDSGVLVVAASGNSGSGTVSYPARYDNAFAVGATDQVNNRASFSQYGTGLDIVAPGVEVESTYLNGEYASLSGTSMATPHVAGVAALIKAKNPMLSNEEIRQQLVQTATPLGSADMYGSGLVNAEVAVQ

SEQ ID NO: 68086 - protein, 254 aa, Unidentified
AQTIPWGISQISAPEAQIAGFTGEGVNVAVLDTGIEDHPDLNVQGGVSFVQGEPDYQDGNGHGTHVAGTIAALDNDEGVIGVAPNADLYAVKVLGANGSGSVSSIAQGLEWAGENGMDIANLSLGSSAPSATLEQAVDEATANGVLVVAASGNSGASSIGYPARYDNAMAVGATDQSDSLANFSQYGEGLDIVAPGVGIDSTYTGSSYDSLSGTSMATPHVAGSAALVKEKNPLWSNEQIRAHLNETATDLGDT

SEQ ID NO: 68087 - protein, 358 aa, Unidentified
ILLLSLGIPSTLTGEKDQDVKIIKGNEYETLPTYRLIISGERASLFFNKIGLIGEKKKKFLELMAGKTTYSTLNNHLYQEIVSIEPAGEEEVFDITAPPKYTWITNGILSLDSGVKVAVLDTGISTHPDLNIRGGASFVPGEPSTQDGNGHGTHVAGTIAALNNSIGVLGVAPSAELYAVKVLGASGSGSVSSIAQGLEWAGNNGMHVANLSLGSPSPSATLEQAVNSATSRGVLVVAASGNSGAGSISYPARYANAMAVGATDQNNNRASFSQYGAGLDIVAPGVNVQSTYPGSTYASLNGTSMATPHVAGAAALVKQKNPSWSNVQIRNHLKNTATSLGSTNLYGSGLVNAEAATR

SEQ ID NO: 68088 - protein, 272 aa, Bacillus sp.
QTVPWGIPHIKADKAHAAGVTGSGVKVAILDTGIDANHADLNVKGGASFVSGEPNALQDGNGHGTHVAGTVAALDNTTGVLGVAPSVSLYAVKVLGASGSGSVSSIAQGLEWAGNNGMHVANLSLGSPSPSATLEQAVNSATSRGVLVVAASGNSGTSGNRNTMDYPARYSSVIAVGAVSSNNTRASFSSVGSELEVMAPGVNILSTYPGSTYATLNGTSMATPHVAGAAALIKAKYPSMTNVQIRNRLKNTATNLGDPFFYGKGVINVESA

SEQ ID NO: 68089 - protein, 272 aa, Bacillus sp.
QTVPWGIPHIKADKAHAAGVTGSGVKVAILDTGIDANHADLNVKGGASFVSGEPNALQDGNGHGTHVAGTVAALDNSIGVLGVAPSVSLYAVKVLGASGSGSVSSIAQGLEWAGNNGMHVANLSLGSPSPSATLEQAVNSATSRGVLVVAAAGNSGTSGNRNTMDYPARYSSVIAVGAVSSNNTRASFSSVGSELEVMAPGVNILSTYPGSTYATLNGTSMAAPHVAGAAALIKAKYPSMTNVQIRNRLKNTATNLGDPFFYGKGVINVESA

SEQ ID NO: 68090 - protein, 272 aa, Bacillus sp.
QTVPWGIPHIKADKAHAAGVTGSGVKVAILDTGIDANHADLNVKGGASFVAGEPNALQDGNGHGTHVAGTVAALDNTTGVLGVAPSVSLYAVKVLGASGSGSVSSIAQGLEWAGNNGMHVANLSLGSPSPSATLEQAVNSATSRGVLVVAASGNSGTSGNRNTMDYPARYSSVIAVGAVSSNNTRASFSSVGSELEVMAPGVNILSTYPGSTYATLNGTSMATPHVAGAAALIKAKYPSMTNVQIRNRLKNTATNLGDPFFYGKGVINVESA

SEQ ID NO: 68091 - protein, 269 aa, Geomicrobium sp. JCM 19037
SQTIPWGIDRVQATAAHNRGITGNGVRVAVLDTGISNHPDLNIQGGTSFVPGEPGIADGNGHGTHVAGTIAALDNNVGVLGVAPDVDLFAVKVLGRSGSGSISGIAQGLQWSSNNNMDVANMSLGSPSPSPTLERAVNQATNSGVLVVAASGNSGASSIGYPARYQNAMAVGATDQNNNRASFSQFGTGLDIMAPGVGVQSTYPGNGYRSLSGTSMAAPHVAGVAALVMSNNPSWSPAQVRSHLNQTATPIGASNQYGNGLVNANAATQ

SEQ ID NO: 68092 - protein, 269 aa, Synthetic construct
AQSVPWGISRVQAPAAHNRGLTGSGVKVAVLDTGISTHPDLNIRGGASFVPGEPSTXEXXXHXXHVAGTIAALNNSIGVLGVAPSAELYAVKXXXXXXXXXXXXXAQGLEWAGNNGMHVANLSXXXXXXXXTLEQAVNSATSRGVLVVAASXXXXXXXXXXPARYANAMAVGATDQNNNRXXXXXYGAGLDIXXXXXXXXXXXXXXXXXXXXXXSMATPHVAGAAALVKQKNPSWSNVQIRNHLKNTATSLGSTNLYGSGLVNAEAATR

SEQ ID NO: 68093 - protein, 184 aa, Unidentified
ASFGNGHGTHVAGTIAALDNSIGVLGVAPRAELYAVKVLGASGSGSVSSIAQGVANLSLGLQAPSATLEQAVNSATSRGVLVVAASGNSGAGSISYPARDQNNNRADFSQYGAGLDIVAPGVNVQSTYPGSTYASLNGTSMATPHVAGAWSNRQIRNHLKNTATSLGSTNLYGSGLVNAEAATR

SEQ ID NO: 68094 - protein, 184 aa, Unidentified
ASFGNGHGTHVAGTIAALDNSIGVLGVAPRAELYAVKVLGASGSGSVSSIAQGVANLSLGLQAPSATLEQAVNSATSRGVLVVAASGNSGAGSISYPARDQNNNRADFSQYGAGLDIVAPGVNVQSTYPGSTYASLNGTSMATPHVAGAWSNVQIRRHLKNTATSLGSTNLYGSGLVNAEAATR

SEQ ID NO: 68095 - protein, 267 aa, Bacillus sp.
AQAIPWGISQISAPEAQIAGFTGEGVNVAVLDTGIEDHPDLNVQGGVSFVQGEPDYQDGNGHGTHVAGTIAALDNDEGVIGVAPNADLYAVKVLGANGSGSVSSIAQGLEWAGENGMDIANLSLGSSAPSATLEQAVDEATANGVLVVAASGNSGASSIGYPARYDNAMAVGATDQSDGLASFSQYGDGLDIVAPGVGIDSTYPGSSYDSLSGTSMATPHVAGAAALVKEKNPLWSNEQIRAHLNETATDLGDMYRFGNGLLNAHAA

SEQ ID NO: 68096 - protein, 273 aa, Bacillus sp.
AQTVPWGIPHIKADKAHAAGVTGSGVKVAILDTGIDANHADLNVKGGASFVAGEPNALQDGNGHGTHVAGTVAALDNTTGVLGVAPSVSLYAVKVLGASGSGSVSSIAQGLEWAGNNGMHVANLSLGSPSPSATLEQAVNSATSRGVLVVAAAGNSGTSGNRNTMDYPARYSSVIAVGAVSSNNTRASFSSVGSELEVMAPGVNILSTYPGSTYATLNGTSMATPHVAGAAALIKAKYPSMTNVQIRNRLKNTATNLGDPFFYGKGVINVESA

SEQ ID NO: 68097 - protein, 272 aa, Bacillus sp.
QTVPWGIPHIKADKAHAAGVTGSGVKVAILDTGIDANHADLNVKGGASFVSGEPNALQDGNGHGTHVAGTVAALDNTTGVLGVAPSVSLYAVKVLGASGSGSVSSIAQGLEWAGNNGMHVANLSLGSPSPSATLEQAVNSATSRGVLVVAAAGNSGTSGNRNTMDYPARYSSVIAVGAVSSNNTRASFSSVGSELEVMAPGVNILSTYPGSTYATLNGTSMATPHVAGAAALIKAKYPSMTNVQIRNRLKNTATNLGDPFFYGKGVINVESA

SEQ ID NO: 68098 - protein, 272 aa, Bacillus sp.
QTVPWGIPHIKADKAHAAGVTGSGVKVAILDTGIDANHADLNVKGGASFVSGEPNALQDGNGHGTHVAGTVAALDNSIGVLGVAPNAELYAVKVLGASGSGSVSSIAQGLEWAGNNGMHVANLSLGSPSPSVTLEQAVNSATSRGVLVVAAAGNSGTSGNRNTMDYPARYSSVIAVGAVSSNNTRASFSSVGSELEVMAPGVNILSTYPGSTYATLNGTSMATPHVAGAAALIKAKYPSMTNVQIRNRLSSTATYLGDPFFYGKGVINVESA

SEQ ID NO: 68099 - protein, 274 aa, Bacillus xiamenensis
AQTVPYGIPQIKAPAVHAQGYKGANVKVAVLDTGIHAAHPDLNVAGGASFVPSEPNATQDFQSHGTHVAGTIAALDNTIGVLGVAPSASLYAVKVLDRNGDGQYSWIISGIEWAVANNMDVINMSLGGPSGSTALKNAVDTANNRGVVVVAAAGNSGSSGSTSTVGYPAKYDSTIAVANVNSNNVRNSSSSAGPELDVSAPGTSILSTVPSSGYASLTGTSMASPHVAGAAALILSKHPNLTNTQVRQRLENTATPLGSSFYYGKGLINVQAAA

SEQ ID NO: 68100 - protein, 272 aa, Unidentified
AQSVPWGISRVQAPAAHNRGLTGSGVKVAVLDTGISTHPDLNIRGGASFVPGEPSTQDGNGHGTHVAGTIAALNNSIGVLGVAPSAELYAVKVLGASGSGSVSSIAQGLEWAGNNGMHVINMSLGGSGSAALKAAVDKAVASGVVVVAAAGNEGTSGSSSTVGYPGKYPSVIAVGAVDSSNQRASFSSVGPELDVMAPGVSIQSTLPGNKYGAYNGTSMASPHVAGAAALILSKHPNWTNTQVRSSLENTTTKLGDSFYYGKGLINVQAAAQ

SEQ ID NO: 68101 - protein, 268 aa, Bacillus subtilis
AGSVPTGISAVGAPAAHAAGLTGSGVLVAVLATGISTHPALAIAGGASPVPGGPSTGAGAGHGTHVAGTIAALAASIGVLGVAPSAGLTAVLVLGASGSGSVSSIAGGLGTAGAAGMHVAALSLGSPSPSATLGGAVASATSAGVLVVAASGASGAGSISTPAATAAAMAVGATAGAAAAASPSGTGAGLAIVAPGVAVGSTTPGSTTASLAGTSMATPHVAGAAALVLGLAPSTSAVGIAAHLLATATSLGSTALTGSGLVAAGAAT

SEQ ID NO: 68102 - protein, 352 aa, Unidentified
TTETTETTGTAEMVKQPFAQNNWESVSQLANRYNRRHTTTDHIVETQQIQSQQQSQIETVQISERADVHNHTVISVESLTETADVYDLEVPVTHNFALASGVFVHNSGVKVAVLDTGISTHPDLNIRGGASFVPGEPSTQDGNGHGTHVAGTIAALNNSIGVLGVAPSAELYAVKVLGASGSGSVSSIAQGLEWAGNNGMHVANLSLGSPSPSATLEQAVNSATSRGVLVVAASGNSGAGSISYPARYANAMAVGATDQNNNRASFSQYGAGLDIVAPGVNVQSTYPGSTYASLNGTSMATPHVAGAAALVKQKNPSWSNVQIRNHLKNTATSLGSTNLYGSGLVNAEAATR

SEQ ID NO: 68103 - protein, 273 aa, Bacillus sp.
AQTVPWGIPHIKADKAHAAGVTGSGVKVAILDTGIDANHADLNVKGGASFVAGEPNALQDGNGHGTHVAGTVAALDNSIGVLGVAPNVSLYAVKVLGASGSGSVSSIAQGLEWAGNNGMHVANLSLGSPSPSATLEQAVNSATSRGVLVVAAAGNSGTSGNRNTMDYPARYSSVIAVGAVSSNNTRASFSSVGSELEVMAPGVNILSTTPGNNYASLNGTSMATPHVAGAAALIKAKYPSMTNVQIRNRLKNTATNLGDPFFYGKGVINVESA

SEQ ID NO: 68104 - protein, 273 aa, Bacillus sp.
AQTVPWGIPHIKADKAHAAGVTGSGVKVAILDTGIDANHADLNVKGGASFVAGEPNALQDGNGHGTHVAGTVAALDNSIGVLGVAPNAELYAVKVLGASGSGSVSSIAQGLEWAGNNGMHVANLSLGSPSPSVTLEQAVNSATSRGVLVVAAAGNSGTSGNRNTMDYPARYSSVIAVGAVSSNNTRASFSSVGSELEVMAPGVNILSTTPGNNYASLNGTSMAAPHVAGAAALIKAKYPSMTNVQIRNRLKNTATNLGDPFFYGKGVINVESA

SEQ ID NO: 68105 - protein, 273 aa, Bacillus sp.
AQTVPWGIPHIKADKAHAAGVTGSGVKVAILDTGIDANHADLNVKGGASFVSGEPNALQDGNGHGTHVAGTVAALDNSIGVLGVAPSVSLYAVKVLGASGSGSVSSIAQGLEWAGNNGMHVANLSLGSPSPSATLEQAVNSATSRGVLVVAAAGNSGTSGNRNTMDYPARYSSVIAVGAVSSNNTRASFSSVGSELEVMAPGVNILSTTPGNNYASLNGTSMAAPHVAGAAALIKAKYPSMTNVQIRNRLKNTATNLGDPFFYGKGVINVESA

SEQ ID NO: 68106 - protein, 272 aa, Bacillus sp.
QTVPWGIPHIKADKAHAAGVTGSGVKVAILDTGIDANHADLNVKGGASFVSGEPNALQDGNGHGTHVAGTVAALDNSIGVLGVAPNAELYAVKVLGASGSGSVSSIAQGLEWAGNNGMHVANLSLGSPSPSATLEQAVNSATSRGVLVVAAAGNSGTSGNRNTMDYPARYSSVIAVGAVSSNNTRASFSSVGSELEVMAPGVNILSTTPGNNYASFNGTSMAAPHVAGAAALIKAKYPSMTNVQIRNRLKNTATNLGDPFFYGKGVINVESA

SEQ ID NO: 68107 - protein, 372 aa, Unidentified
KGFVAGNNLENQLNFYLEFKTDSQLVAEKLVLILSKFGLVADVSEIEVNEEDIAKIYRIIIEGLEDKNIHNLSKVEQKISALTTGDIAWGKIESIEEFEIDDYVYDFSVPNYENFIGGSYNVFAHNSGVKVAVLDTGISTHPDLNIRGGASFVPGEPSTQDGNGHGTHVAGTIAALNNSIGVLGVAPSAELYAVKVLGASGSGSVSSIAQGLEWAGNNGMHVANLSLGSPSPSATLEQAVNSATSRGVLVVAASGNSGAGSISYPARYANAMAVGATDQNNNRASFSQYGAGLDIVAPGVNVQSTYPGSTYASLNGTSMATPHVAGAAALVKQKNPSWSNVQIRNHLKNTATSLGSTNLYGSGLVNAEAATR

SEQ ID NO: 68108 - protein, 274 aa, Bacillus sp.
AQTVPYGIPQIKAPAVHAQGYKGANVKVAVLDTGIHAAHPDLNVAGGASFVPSEPNATQDFQSHGTHVAGTIAALDNTIGVLGVAPSASLYAVKVLDRNGDGQYSWIISGIEWAVANNMDVINMSLGGPSGSTALKNAVDTANNRGVVVVAAAGNSGSSGSTSTVGYPAKYDSTIAVANVNSNNVRNSSSSAGPELDVSAPGTSILSTVPSSGYASYTGTSMASPHVAGAAALILSKHPNLTNTQVRQRLENTATPLGSSFYYGKGLINVQAAA

SEQ ID NO: 68109 - protein, 268 aa, Alkalihalobacillus alcalophilus
AGSVPTGISAVGAPAAHAAGLTGSGVLVAVLATGISTHPALAIAGGASPVPGGPSTGAGAGHGTHVAGTIAALAASIGVLGVAPAAGLTAVLVLGASGSGSVSSIAGGLGTAGAAGMHVAALSLGSPSPSATLGGAVASATSAGVLVVAASGASGAGSISTPAATAAAMAVGATAGAAAAASPSGTGAGLAIVAPGVAVGSTTPGSTTASLAGTSMATPHVAGAAALVLGLAPSTSAVGIAAHLLATATSLGSTALTGSGLVAAGAAT

SEQ ID NO: 68110 - protein, 267 aa, Unidentified
AQTIPWGISQISAPEAQIAGFTGEGVNVAVLDTGIEDHPDLNVQGGVSFVQGEPDYQDGNGHGTHVAGTIAALDNDEGVIGVAPNADLYAVKVLGANGSGSVSSIAQGLEWAGENGMDIANLSLGSSAPSATLEQAVDEATANGVLVVAASGNSGASSIGYPARYDNAMAVGATDQSDSLANFSQYGEGLDIVAPGVGIDSTYTGSSYDSLSGTSMATPHVAGSAALVKEKNPLWSNEQIRAHLNETATDLGDTYRFGNGLLNAHAA

SEQ ID NO: 68111 - protein, 274 aa, Bacillus xiamenensis
AQTVPYGIPQIKAPAVHAQGYKGANVKVAVLDTGIHAAHPDLNVAGGASFVPSEPNATQDFQSHGTHVAGTIAALDNTIGVLGVAPSASLYAVKVLDRNGDGQYSWIISGIEWAVANNMDVINISLGGPSGSTALKNAVDTANNRGVVVVAAAGNSGSSGSTSTVGYPAKYDSTIAVANVNSNNQRNSSSSAGPELDVSAPGTSILSTVPSSGYASYTGTSMASPHVAGAAALILSKHPNLTNTQVRQRLENTATPLGSSFYYGKGLINVQAAA

SEQ ID NO: 68112 - protein, 274 aa, Bacillus xiamenensis
AQTVPYGIPQIKAPAVHAQGYKGANVKVAVLDTGIHAAHPDLNVAGGASFVPSEPNATQDFQSHGTHVAGTIAALDNTIGVLGVAPSASLYAVKVLDRNGDGQYSWIISGIEWAVANNMDVINMSLGSPSGSTALKNAVDTANNRGVVVVAAAGNSGSSGSTSTVGYPAKYDSTIAVANVNSNNVRNSSSSAGPELDVSAPGTSILSTVPSSGYASYTGTSMASPHVAGAAALILSKHPNLTNTQVRQRLENTATPLGSSFYYGKGLINVQAAA

SEQ ID NO: 68113 - protein, 274 aa, Bacillus xiamenensis
AQTVPYGIPQIKAPAVHAQGYKGANVKVAVLDTGIHAAHPDLNVAGGASFVPSEPNATQDFQSHGTHVAGTIAALDNTIGVLGVAPSASLYAVKVLDRNGDGQYSWIISGIEWAVANNMDVINMSLGSPSGSTALKNAVDTANNRGVVVVAAAGNSGSSGSTSTVGYPAKYDSTIAVANVNSNNQRNSSSSAGPELDVSAPGTSILSTVPSSGYASYTGTSMASPHVAGAAALILSKHPNLTNTQVRQRLENTATPLGSSFYYGKGLINVQAAA

SEQ ID NO: 68114 - protein, 274 aa, Bacillus xiamenensis
AQTVPYGIPQIKAPAVHAQGYKGANVKVAVLDTGIHAAHPDLNVAGGASFVPSEPNATQDFQSHGTHVAGTIAALDNTIGVLGVAPDASLYAVKVLDRNGDGQYSWIISGIEWAVANNMDVINMSLGGPSGSTALKNAVDTANNRGVVVVAAAGNSGSSGSTSTVGYPAKYDSTIAVANVNSNNVRNSSSSAGPELDVSAPGTSILSTVPSSGYASYTGTSMASPHVAGAAALILSKHPNLTNTQVRQRLENTATPLGSSFYYGKGLINVQAAA

SEQ ID NO: 68115 - protein, 274 aa, Bacillus xiamenensis
AQTVPYGIPQIKAPAVHAQGYKGANVKVAVLDTGIHAAHPDLNVAGGASFVPSEPNATQDFQSHGTHVAGTIAALDNNIGVLGVAPSASLYAVKVLDRNGDGQYSWIISGIEWAVANNMDVINMSLGGPSGSTALKNAVDTANNRGVVVVAAAGNSGSSGSTSTVGYPAKYDSTIAVANVNSNNQRNSSSSAGPELDVSAPGTSILSTVPSSGYASYTGTSMASPHVAGAAALILSKHPNLTNTQVRQRLENTATPLGSSFYYGKGLINVQAAA

SEQ ID NO: 68116 - protein, 274 aa, Bacillus xiamenensis
AQTVPYGIPQIKAPAVHAQGYKGANVKVAVLDTGIHAAHPDLNVAGGASFVPSEPNATQDFQSHGTHVAGTIAALDNTIGVLGVAPSASLYAVKVLDRNGDGQYSWIISGIEWAVANNMDVINMSLGGPSGSTALKNAVDTANNRGVVVVAAAGNSGSSGSTSTVQYPAKYDSTIAVANVNSNNQRNSSSSAGPELDVSAPGTSILSTVPSSGYASYTGTSMASPHVAGAAALILSKHPNLTNTQVRQRLENTATPLGSSFYYGKGLINVQAAA

SEQ ID NO: 68117 - protein, 274 aa, Bacillus xiamenensis
AQTVPYGIPQIKAPAVHAQGYKGANVKVAVLDTGIHAAHPDLNVAGGASFVPSEPNATQDFQSHGTHVAGTIAALDNTIGVLGVAPSASLYAVKVLDRNGDGQYSWIISGIEWAVANNMDVINMSLGGPSGSTALKNAVDTANNRGVVVVAAAGNSGSSGSTSTVQYPAKYDSTIAVANVNSNNVRNSSSSAGPELDVSAPGTSILSTVPSSGYASYTGTSMASPHVAGAAALILSKHPNLTNTQVRQRLENTATPLGSSFYYGKGLINVQAAA

SEQ ID NO: 68118 - protein, 274 aa, Bacillus xiamenensis
AQTVPYGIPQIKAPAVHAQGYKGANVKVAVLDTGIHAAHPDLNVAGGASFVPSEPNATQDFQSHGTHVAGTIAALDNNIGVLGVAPSASLYAVKVLDRNGDGQYSWIISGIEWAVANNMDVINMSLGGPSGSTALKNAVDTANNRGVVVVAAAGNSGSSGSTSTVGYPAKYDSTIAVANVNSNNVRNSSSSAGPELDVSAPGTSILSTVPSSGYASYTGTSMASPHVAGAAALILSKHPNLTNTQVRQRLENTATPLGSSFYYGKGLINVQAAA

SEQ ID NO: 68119 - protein, 274 aa, Bacillus xiamenensis
AQTVPYGIPQIKAPAVHAQGYKGANVKVAVLDTGIHAAHPDLNVAGGASFVPSEPNATQDFQSHGTHVAGTIAALDNTIGVLGVAPSASLYAVKVLDRNGDGQYSWIISGIEWAVANNMDVINMSLGGPSGSTALKNAVDTANNRGVVVVAAAGNSGSSGSTSTVGYPAKYDSTIAVANVNENNVRNSSSSAGPELDVSAPGTSILSTVPSSGYASYTGTSMASPHVAGAAALILSKHPNLTNTQVRQRLENTATPLGSSFYYGKGLINVQAAA

SEQ ID NO: 68120 - protein, 274 aa, Bacillus xiamenensis
AQTVPYGIPQIKAPAVHAQGYKGANVKVAVLDTGIHAAHPDLNVAGGASFVPSEPNATQDFQSHGTHVAGTIAALDNTIGVLGVAPSASLYAVKVLDRNGDGQYSWIISGIEWAVANNMDVINMSLGGPSGSTALKNAVDTANNRGVVVVAAAGNSGSSGSTSTVGYPAKYDSTIAVANVNSNNQRNSSSSAGPELDVSAPGTSILSTVPSSGYASYTGTSMASPHVAGAAALILSKHPNLTNTQVRQRLENTATPLGPSFYYGKGLINVQAAA

SEQ ID NO: 68121 - protein, 268 aa, Geomicrobium sp. JCM 19038
SQTIPWGIDRVNAPAANASGVTGGGVSVAILDTGISTHEDLNIQGGESFVPGEPGIDDGNGHGTHVAGTIAALDNDLGVLGVSPDVDLYAVKVLGSDGSGNISSIAEGLEWAGENGMDVANMSLGSPLPSPTLEQAVDEATDRGVLVVAASGNSGASSIGYPAAYDNAMAVGATTQNDTRASFSQYGAGLDIVAPGVGVESTYPGGGYRSLDGTSMAAPHVAGVAALVLEQNPSWSPQQVRNHLNDTATDLGDSNQYGSGLVDAVSAT

SEQ ID NO: 68122 - protein, 268 aa, Geomicrobium sp. JCM 19055
SQTVPWGIDRVNAPAANASGVTGGGVSVAVLDTGISTHEDLNIQGGESFVPGEPGIDDGNGHGTHVAGTIAALDNDTGVVGVSPDADLYAVKVLGSDGSGNISSIAQGLQWAGENGMDVANMSLGSPLPSPTLEQAVDEATDRGVLVVAASGNSGASSLSYPAAYDNAMAVGATTQSDARASFSQYGAGLDLVAPGVGVESTYPGGGYRSLDGTSMATPHVAGVAALVLEQNPSWSPQQVRSHVNDTATDLGDTNQFGSGLVDAESAT

SEQ ID NO: 68123 - protein, 274 aa, Bacillus xiamenensis
AQTVPYGIPQIKAPAVHAQGYKGANVKVAVLDTGIHAAHPDLNVAGGASFVPSEPNATQDFQSHGTHVAGTIAALDNTIGVLGVAPSASLYAVKVLDRNGDGQYSWIISGIEWAVANNMDVINISLGGPSGSTALKNAVDTANNRGVVVVAAAGNSGSSGSTSTVGYPAKYDSTIAVANVNSNNVRNSSSSAGPELDVSAPGTSILSTVPSSGYASYTGTSMASPHVAGAAALILSKHPNLTNTQVRQRLENTATPLGPSFYYGKGLINVQAAA

SEQ ID NO: 68124 - protein, 274 aa, Bacillus xiamenensis
AQTVPYGIPQIKAPAVHAQGYKGANVKVAVLDTGIHAAHPDLNVAGGASFVPSEPNATQDFQSHGTHVAGTIAALDNNIGVLGVAPSASLYAVKVLDRNGDGQYSWIISGIEWAVANNMDVINMSLGSPSGSTALKNAVDTANNRGVVVVAAAGNSGSSGSTSTVGYPAKYDSTIAVANVNSNNVRNSSSSAGPELDVSAPGTSILSTVPSSGYASYTGTSMASPHVAGAAALILSKHPNLTNTQVRQRLENTATPLGSSFYYGKGLINVQAAA

SEQ ID NO: 68125 - protein, 274 aa, Bacillus xiamenensis
AQTVPYGIPQIKAPAVHAQGYKGANVKVAVLDTGIHAAHPDLNVAGGASFVPSEPNATQDFQSHGTHVAGTIAALDNNIGVLGVAPSASLYAVKVLDRNGDGQYSWIISGIEWAVANNMDVINMSLGGPSGSTALKNAVDTANNRGVVVVAAAGNSGSSGSTSTVQYPAKYDSTIAVANVNSNNVRNSSSSAGPELDVSAPGTSILSTVPSSGYASYTGTSMASPHVAGAAALILSKHPNLTNTQVRQRLENTATPLGSSFYYGKGLINVQAAA

SEQ ID NO: 68126 - protein, 274 aa, Bacillus xiamenensis
AQVVPYGIPQIKAPAVHAQGYKGANVKVAVLDTGIHAAHPDLNVAGGASFVPSEPNATQDFQSHGTHVAGTIAALDNTIGVLGVAPSASLYAVKVLDRNGDGQYSWIISGIEWAVANNMDVINMSLGSPSGSTALKNAVDTANNRGVVVVAAAGNSGSSGSTSTVGYPAKYDSTIAVANVNSNNVRNSSSSAGPELDVSAPGTSILSTVPSSGYASYTGTSMASPHVAGAAALILSKHPNLTNTQVRQRLENTATPLGSSFYYGKGLINVQAAA

SEQ ID NO: 68127 - protein, 274 aa, Bacillus xiamenensis
AQTVPYGIPQIKAPAVHAQGYKGANVKVAVLDTGIHAAHPDLNVAGGASFVPSEPNATQDFQSHGTHVSGTIAALDNTIGVLGVAPSASLYAVKVLDRNGDGQYSWIISGIEWAVANNMDVINMSLGGPSGSTALKNAVDTANNRGVVVVAAAGNSGSSGSTSTVGYPAKYDSTIAVANVNSNNVRNSSSSAGPELDVSAPGTSILSTVPSSGYASYTGTSMASPHVAGAAALILSKHPNLTNTQVRQRLENTATPLGPSFYYGKGLINVQAAA

SEQ ID NO: 68128 - protein, 274 aa, Bacillus xiamenensis
AQTVPYGIPQIKAPAVHAQGYKGANVKVAVLDTGIHAAHPDLNVAGGASFVPSEPNATQDFQSHGTHVAGTIAALDNNIGVLGVAPSASLYAVKVLDRNGDGQYSWIISGIEWAVANNMDVINMSLGGPSGSTALKNAVDTANNRGVVVVAAAGNSGSSGSTSTVGYPAKYDSTIAVANVNSNNVRNSSSSAGPELDVSAPGTSILSTVPSSGYASYTGTSMASPHVAGAAALILSKHPNLTNTQVRQRLENTATPLGPSFYYGKGLINVQAAA

SEQ ID NO: 68129 - protein, 274 aa, Bacillus xiamenensis
AQTVPYGIPQIKAPAVHAQGYKGANVKVAVLDTGIHAAHPDLNVAGGASFVPSEPNATQDFQSHGTHVAGTIAALDNTIGVLGVAPSASLYAVKVLDRNGDGQYSWIISGIEWAVANNMDVINISLGGPSGSTALKNAVDTANNRGVVVVAAAGNSGSSGSTSTVQYPAKYDSTIAVANVNSNNVRNSSSSAGPELDVSAPGTSILSTVPSSGYASYTGTSMASPHVAGAAALILSKHPNLTNTQVRQRLENTATPLGSSFYYGKGLINVQAAA

SEQ ID NO: 68130 - protein, 274 aa, Bacillus xiamenensis
AQVVPYGIPQIKAPAVHAQGYKGANVKVAVLDTGIHAAHPDLNVAGGASFVPSEPNATQDFQSHGTHVAGTIAALDNTIGVLGVAPSASLYAVKVLDRNGDGQYSWIISGIEWAVANNMDVINMSLGGPSGSTALKNAVDTANNRGVVVVAAAGNSGSSGSTSTVQYPAKYDSTIAVANVNSNNVRNSSSSAGPELDVSAPGTSILSTVPSSGYASYTGTSMASPHVAGAAALILSKHPNLTNTQVRQRLENTATPLGSSFYYGKGLINVQAAA

SEQ ID NO: 68131 - protein, 274 aa, Bacillus xiamenensis
AQVVPYGIPQIKAPAVHAQGYKGANVKVAVLDTGIHAAHPDLNVAGGASFVPSEPNATQDFQSHGTHVAGTIAALDNTIGVLGVAPSASLYAVKVLDRNGDGQYSWIISGIEWAVANNMDVINMSLGGPSGSTALKNAVDTANNRGVVVVAAAGNSGSSGSTSTVGYPAKYDSTIAVANVNSNNVRNSSSSAGPELDVSAPGTSILSTVPSSGYASYTGTSMASPHVAGAAALILSKHPNLTNTQVRQRLENTATPLGPSFYYGKGLINVQAAA

SEQ ID NO: 68132 - protein, 274 aa, Bacillus xiamenensis
AQTVPYGIPQIKAPAVHAQGYKGANVKVAVLDTGIHAAHPDLNVAGGASFVPSEPNATQDFQSHGTHVAGTIAALDNTIGVLGVAPSASLYAVKVLDRNGDGQYSWIISGIEWAVANNMDVINMSLGSPSGSTALKNAVDTANNRGVVVVAAAGNSGSSGSTSTVGYPAKYDSTIAVANVNSNNVRNSSSSAGPELDVSAPGTSILSTVPSSGYASYTGTSMASPHVAGAAALILSKHPNLTNTQVRQRLENTATPLGPSFYYGKGLINVQAAA

SEQ ID NO: 68133 - protein, 274 aa, Bacillus xiamenensis
AQTVPYGIPQIKAPAVHAQGYKGANVKVAVLDTGIHAAHPDLNVAGGASFVPSEPNATQDFQSHGTHVAGTIAALDNNIGVLGVAPSASLYAVKVLDRNGDGQYSWIISGIEWAVANNMDVINISLGGPSGSTALKNAVDTANNRGVVVVAAAGNSGSSGSTSTVGYPAKYDSTIAVANVNSNNVRNSSSSAGPELDVSAPGTSILSTVPSSGYASYTGTSMASPHVAGAAALILSKHPNLTNTQVRQRLENTATPLGSSFYYGKGLINVQAAA

SEQ ID NO: 68134 - protein, 274 aa, Bacillus xiamenensis
AQVVPYGIPQIKAPAVHAQGYKGANVKVAVLDTGIHAAHPDLNVAGGASFVPSEPNATQDFQSHGTHVAGTIAALDNTIGVLGVAPSASLYAVKVLDRNGDGQYSWIISGIEWAVANNMDVINISLGGPSGSTALKNAVDTANNRGVVVVAAAGNSGSSGSTSTVGYPAKYDSTIAVANVNSNNVRNSSSSAGPELDVSAPGTSILSTVPSSGYASYTGTSMASPHVAGAAALILSKHPNLTNTQVRQRLENTATPLGSSFYYGKGLINVQAAA

SEQ ID NO: 68135 - protein, 274 aa, Bacillus xiamenensis
AQTVPYGIPQIKAPAVHAQGYKGANVKVAVLDTGIHAAHPDLNVAGGASFVPSEPNATQDFQSHGTHVSGTIAALDNTIGVLGVAPSASLYAVKVLDRNGDGQYSWIISGIEWAVANNMDVINMSLGGPSGSTALKNAVDTANNRGVVVVAAAGNSGSSGSTSTVQYPAKYDSTIAVANVNSNNVRNSSSSAGPELDVSAPGTSILSTVPSSGYASYTGTSMASPHVAGAAALILSKHPNLTNTQVRQRLENTATPLGSSFYYGKGLINVQAAA

SEQ ID NO: 68136 - protein, 274 aa, Bacillus xiamenensis
AQTVPYGIPQIKAPAVHAQGYKGANVKVAVLDTGIHAAHPDLNVAGGASFVPSEPNATQDFQSHGTHVAGTIAALDNTIGVLGVAPSASLYAVKVLDRNGDGQYSWIISGIEWAVANNMDVINMSLGGPSGSTALKNAVDTANNRGVVVVAAAGNSGSSGSTSTVQYPAKYDSTIAVANVNSNNVRNSSSSAGPELDVSAPGTSILSTVPSSGYASYTGTSMASPHVAGAAALILSKHPNLTNTQVRQRLENTATPLGPSFYYGKGLINVQAAA

SEQ ID NO: 68137 - protein, 274 aa, Bacillus xiamenensis
AQTVPYGIPQIKAPAVHAQGYKGANVKVAVLDTGIHAAHPDLNVAGGASFVPSEPNATQDFQSHGTHVAGTIAALDNTIGVLGVAPSASLYAVKVLDRNGDGQYSWIISGIEWAVANNMDVINISLGSPSGSTALKNAVDTANNRGVVVVAAAGNSGSSGSTSTVGYPAKYDSTIAVANVNSNNVRNSSSSAGPELDVSAPGTSILSTVPSSGYASYTGTSMASPHVAGAAALILSKHPNLTNTQVRQRLENTATPLGSSFYYGKGLINVQAAA

SEQ ID NO: 68138 - protein, 274 aa, Bacillus xiamenensis
AQTVPYGIPQIKAPAVHAQGYKGANVKVAVLDTGIHAAHPDLNVAGGASFVPSEPNATQDFQSHGTHVSGTIAALDNTIGVLGVAPSASLYAVKVLDRNGDGQYSWIISGIEWAVANNMDVINISLGGPSGSTALKNAVDTANNRGVVVVAAAGNSGSSGSTSTVGYPAKYDSTIAVANVNSNNVRNSSSSAGPELDVSAPGTSILSTVPSSGYASYTGTSMASPHVAGAAALILSKHPNLTNTQVRQRLENTATPLGSSFYYGKGLINVQAAA

SEQ ID NO: 68139 - protein, 274 aa, Bacillus xiamenensis
AQTVPYGIPQIKAPAVHAQGYKGANVKVAVLDTGIHAAHPDLNVAGGASFVPSEPNATQDFQSHGTHVSGTIAALDNTIGVLGVAPSASLYAVKVLDRNGDGQYSWIISGIEWAVANNMDVINMSLGSPSGSTALKNAVDTANNRGVVVVAAAGNSGSSGSTSTVGYPAKYDSTIAVANVNSNNVRNSSSSAGPELDVSAPGTSILSTVPSSGYASYTGTSMASPHVAGAAALILSKHPNLTNTQVRQRLENTATPLGSSFYYGKGLINVQAAA

SEQ ID NO: 68140 - protein, 274 aa, Bacillus licheniformis
AQTVPYAIPLIKGDKVQGQAWKAGNVKVGVLDTAIQGSHPDLNVVGAGSYVGAEGYNTDANAHATHVGATVGGLDNTTAVLAVGPSVSLYGVKVLNSSASASYSAIVSAIEWGTTNAMDVINMSLAAGSASTGMKQGVDNGYGRAVVVVGGAANSASSANTNTIAYPGKYDSVIGVAGVDSNSNRGSWSSVAGELEVMGPAGAVYSTYPTNTYGTLNATSMGSPHVGAGAGLILSKHPNLSGSQVRNRLSSTATYLASSWYYAKALINVEAAAQ

SEQ ID NO: 68141 - protein, 274 aa, Bacillus xiamenensis
AQTVPYGIPQIKAPAVHAQGYKGANVKVAVLDTGIHAAHPDLNVAGGASFVPSEPNATQDFQSHGTHVAGTIAALDNTIGVLGVAPSASLYAVKVLDRNGDGQYSWIISGIEWAVANNMDVINISLGGPSGSTALKNAVDTANNRGVVVVAAAGNSGSSGSTSTVQYPAKYDSTIAVANVNSNNVRNSSSSAGPELDVSAPGTSILSTVPSSGYASYTGTSMASPHVAGAAALILSKHPNLTNTQVRQRLENTATPLGPSFYYGKGLINVQAAA

SEQ ID NO: 68142 - protein, 274 aa, Bacillus xiamenensis
AQTVPYGIPQIKAPAVHAQGYKGANVKVAVLDTGIHAAHPDLNVAGGASFVPSEPNATQDFQSHGTHVAGTIAALDNNIGVLGVAPSASLYAVKVLDRNGDGQYSWIISGIEWAVANNMDVINMSLGSPSGSTALKNAVDTANNRGVVVVAAAGNSGSSGSTSTVQYPAKYDSTIAVANVNSNNVRNSSSSAGPELDVSAPGTSILSTVPSSGYASYTGTSMASPHVAGAAALILSKHPNLTNTQVRQRLENTATPLGSSFYYGKGLINVQAAA

SEQ ID NO: 68143 - protein, 274 aa, Bacillus xiamenensis
AQVVPYGIPQIKAPAVHAQGYKGANVKVAVLDTGIHAAHPDLNVAGGASFVPSEPNATQDFQSHGTHVAGTIAALDNNIGVLGVAPSASLYAVKVLDRNGDGQYSWIISGIEWAVANNMDVINMSLGGPSGSTALKNAVDTANNRGVVVVAAAGNSGSSGSTSTVGYPAKYDSTIAVANVNSNNVRNSSSSAGPELDVSAPGTSILSTVPSSGYASYTGTSMASPHVAGAAALILSKHPNLTNTQVRQRLENTATPLGPSFYYGKGLINVQAAA

SEQ ID NO: 68144 - protein, 274 aa, Bacillus xiamenensis
AQVVPYGIPQIKAPAVHAQGYKGANVKVAVLDTGIHAAHPDLNVAGGASFVPSEPNATQDFQSHGTHVAGTIAALDNTIGVLGVAPSASLYAVKVLDRNGDGQYSWIISGIEWAVANNMDVINMSLGSPSGSTALKNAVDTANNRGVVVVAAAGNSGSSGSTSTVQYPAKYDSTIAVANVNSNNVRNSSSSAGPELDVSAPGTSILSTVPSSGYASYTGTSMASPHVAGAAALILSKHPNLTNTQVRQRLENTATPLGSSFYYGKGLINVQAAA

SEQ ID NO: 68145 - protein, 274 aa, Bacillus stratosphericus
AQTVPYGIPQIKAPAVHAQGYKGANVKVAVLDTGIHAAHPDLNVAGGASFVPSEPNATQDFQSHGTHVAGTIAALDNTIGVLGVAPSASLYAVKVLDRNGDGQYSWIISGIEWAVANNMDVINMSLGGPSGSTALKNAVDTANNRGVVVVAAAGNSGSTGSTSTVGYPAKYDSTIAVANVNSNNVRNSSSSAGPELDVSAPGTSILSTVPSSGYTSYTGTSMASPHVAGAAALILSKYPNLSTSQVRQRLENTATPLGNSFYYGKGLINVQAAS

SEQ ID NO: 68146 - protein, 274 aa, Bacillus pumilus
AQTVPYGIPQIKAPAVHAQGYKGANVKVAVLDTGIHAAHPDLNVAGGASFVPSEPNATQDFQGHGTHVAGTIAALDNTIGVLGVAPSASLYAVKVLDRYGDGQYSWIISGIEWAVANNMDVINMSLGGPSGSTALKNAVDTANNRGVVVVAAAGNSGSSGSSSTVGYPAKYDSTIAVANVNSNNVRNSSSSAGPELDVSAPGTSILSTVPSSGYTSYTGTSMASPHVAGAAALILSKNPNLTNSQVRQRLENTATPLGDSFYYGKGLINVQAAS

SEQ ID NO: 68147 - protein, 274 aa, Bacillus xiamenensis
AQTVPYGIPQIKAPAVHAQGYKGANVKVAVLDTGIHAAHPDLNVAGGASFVPSEPNATQDFQSHGTHVAGTIAALDNTIGVLGVAPSASLYAVKVLDRNGDGQYSWIISGIEWAVANNMDVINISLGSPSGSTALKNAVDTANNRGVVVVAAAGNSGSSGSTSTVQYPAKYDSTIAVANVNSNNVRNSSSSAGPELDVSAPGTSILSTVPSSGYASYTGTSMASPHVAGAAALILSKHPNLTNTQVRQRLENTATPLGSSFYYGKGLINVQAAA

SEQ ID NO: 68148 - protein, 274 aa, Bacillus xiamenensis
AQTVPYGIPQIKAPAVHAQGYKGANVKVAVLDTGIHAAHPDLNVAGGASFVPSEPNATQDFQSHGTHVAGTIAALDNNIGVLGVAPSASLYAVKVLDRNGDGQYSWIISGIEWAVANNMDVINMSLGGPSGSTALKNAVDTANNRGVVVVAAAGNSGSSGSTSTVQYPAKYDSTIAVANVNSNNVRNSSSSAGPELDVSAPGTSILSTVPSSGYASYTGTSMASPHVAGAAALILSKHPNLTNTQVRQRLENTATPLGPSFYYGKGLINVQAAA

SEQ ID NO: 68149 - protein, 274 aa, Bacillus xiamenensis
AQVVPYGIPQIKAPAVHAQGYKGANVKVAVLDTGIHAAHPDLNVAGGASFVPSEPNATQDFQSHGTHVAGTIAALDNTIGVLGVAPSASLYAVKVLDRNGDGQYSWIISGIEWAVANNMDVINMSLGSPSGSTALKNAVDTANNRGVVVVAAAGNSGSSGSTSTVGYPAKYDSTIAVANVNSNNVRNSSSSAGPELDVSAPGTSILSTVPSSGYASYTGTSMASPHVAGAAALILSKHPNLTNTQVRQRLENTATPLGPSFYYGKGLINVQAAA

SEQ ID NO: 68150 - protein, 274 aa, Bacillus xiamenensis
AQVVPYGIPQIKAPAVHAQGYKGANVKVAVLDTGIHAAHPDLNVAGGASFVPSEPNATQDFQSHGTHVAGTIAALDNTIGVLGVAPSASLYAVKVLDRNGDGQYSWIISGIEWAVANNMDVINISLGSPSGSTALKNAVDTANNRGVVVVAAAGNSGSSGSTSTVGYPAKYDSTIAVANVNSNNVRNSSSSAGPELDVSAPGTSILSTVPSSGYASYTGTSMASPHVAGAAALILSKHPNLTNTQVRQRLENTATPLGSSFYYGKGLINVQAAA

SEQ ID NO: 68151 - protein, 274 aa, Bacillus xiamenensis
AQVVPYGIPQIKAPAVHAQGYKGANVKVAVLDTGIHAAHPDLNVAGGASFVPSEPNATQDFQSHGTHVAGTIAALDNTIGVLGVAPSASLYAVKVLDRNGDGQYSWIISGIEWAVANNMDVINMSLGGPSGSTALKNAVDTANNRGVVVVAAAGNSGSSGSTSTVQYPAKYDSTIAVANVNSNNVRNSSSSAGPELDVSAPGTSILSTVPSSGYASYTGTSMASPHVAGAAALILSKHPNLTNTQVRQRLENTATPLGPSFYYGKGLINVQAAA

SEQ ID NO: 68152 - protein, 274 aa, Bacillus xiamenensis
AQTVPYGIPQIKAPAVHAQGYKGANVKVAVLDTGIHAAHPDLNVAGGASFVPSEPNATQDFQSHGTHVAGTIAALDNNIGVLGVAPSASLYAVKVLDRNGDGQYSWIISGIEWAVANNMDVINISLGGPSGSTALKNAVDTANNRGVVVVAAAGNSGSSGSTSTVQYPAKYDSTIAVANVNSNNVRNSSSSAGPELDVSAPGTSILSTVPSSGYASYTGTSMASPHVAGAAALILSKHPNLTNTQVRQRLENTATPLGSSFYYGKGLINVQAAA

SEQ ID NO: 68153 - protein, 274 aa, Bacillus xiamenensis
AQVVPYGIPQIKAPAVHAQGYKGANVKVAVLDTGIHAAHPDLNVAGGASFVPSEPNATQDFQSHGTHVAGTIAALDNNIGVLGVAPSASLYAVKVLDRNGDGQYSWIISGIEWAVANNMDVINMSLGGPSGSTALKNAVDTANNRGVVVVAAAGNSGSSGSTSTVQYPAKYDSTIAVANVNSNNVRNSSSSAGPELDVSAPGTSILSTVPSSGYASYTGTSMASPHVAGAAALILSKHPNLTNTQVRQRLENTATPLGSSFYYGKGLINVQAAA

SEQ ID NO: 68154 - protein, 268 aa, Bacillus subtilis
AGSVPTGISAVGAPAAHAAGLTGSGVLVAVLATGISTHPALAIAGGASPVPGGPSTGAGAGHGTHVAGTIAALAASIGVLGVAPSAGLTAVLVLGASGGGAISSIAGGLGTAGAAGMHVAALSLGSPSPSATLGGAVASATSAGVLVVAASGASGAGSISTPAATAAAMAVGATAGAAAAASPSGTGAGLAIVAPGVAVGSTTPGSTTASLAGTSMATPHVAGAAALVLGLAPSTSAVAIAAHLLATATSLGSTALTGSGLIAAPAAT

SEQ ID NO: 68155 - protein, 268 aa, Alkalihalobacillus alcalophilus
AGSVPTGISAVGAPAAHAAGLTGSGVLVAVLATGISTHPALAIAGGASPVPGGPSTGAGAGHGTHVAGTIAALAASIGVLGVAPSAGLTAVLVLGASGSGSVSSIAGGLGTAGAAAMHVAALSLGLGAPSATLGGAVASATSAGVLVVAASGASGAGSISTPAATAAAMAVGATAGAAAAASPSGTGAGLAIVAPGVAVGSTTPGSTTASLAGTSMATPHVAGAAALVLGLAPSTSAVGIAAHLLATATSLGSTALTGSGLVAAGAAT

SEQ ID NO: 68156 - protein, 274 aa, Bacillus xiamenensis
AQVVPYGIPQIKAPAVHAQGYKGANVKVAVLDTGIHAAHPDLNVAGGASFVPSEPNATQDFQSHGTHVAGTIAALDNNIGVLGVAPSASLYAVKVLDRNGDGQYSWIISGIEWAVANNMDVINMSLGGPSGSTALKNAVDTANNRGVVVVAAAGNSGSSGSTSTVQYPAKYDSTIAVANVNSNNVRNSSSSAGPELDVSAPGTSILSTVPSSGYASYTGTSMASPHVAGAAALILSKHPNLTNTQVRQRLENTATPLGPSFYYGKGLINVQAAA

SEQ ID NO: 68157 - protein, 274 aa, Bacillus pumilus
AQTVPYGIPQIKAPAVHAQGYKGANVKVAVLDTGIHAAHPDLNVAGGASFVPSEPNATQDFQSHGTHVAGTIAALDNTIGVLGVAPSASLYAVKVLDRYGDGQYSWIISGIEWAVANNMDVINMSLGGPNGSTALKNAVDTANNRGVVVVAAAGNSGSTGSTSTVGYPAKYDSTIAVANVNSNNVRNTSSSAGPELDVSAPGTSILSTVPSSGYTSYTGTSMASPHVAGAAALILSKYPNLSTSQVRQRLENTATPLGSSFYYGKGLINVQAAS

SEQ ID NO: 68158 - protein, 274 aa, Bacillus pumilus
AQTVPYGIPQIKAPAVHAQGYKGANVKVAVLDTGIHAAHPDLNVAGGASFVPSEPNATQDFQSHGTHVAGTIAALDNTIGVLGVAPSASLYAVKVLDRNGDGQYSWIISGIEWAVANNMDVINMSLGGASGSTALKNAVDTANSRGVVVVAAAGNSGSSGSRSTVGYPAKYESTIAVANVNSNNVRNSSSSAGPELDVSAPGTSILSTVPSSGYTSYTGTSMASPHVAGAAALILSKNPNLTNSQVRQRLENTATPLGDSFYYGKGLINVQAAS

SEQ ID NO: 68159 - protein, 274 aa, Bacillus pumilus
AQTVPYGIPQIKAPAVHAQGYKGANVKVAVLDTGIHAAHPDLNVAGGASFVPSEPNATQDFQSHGTHVAGTIAALDNTIGVLGVAPSASLYAVKVLDRYGDGQYSWIISGIEWAVANNMDVINMSLGGPSGSTALKNAVDTANNRGVVVVAAAGNSGSSGSSSTVGYPAKYDSTIAVANVNSNFVRNSSSSAGPELDVSAPGTSILSTVPSSGYTSYTGTSMASPHVAGAAALILSKNPNLTNSQVRQRLENTATPLGDSFYYGKGLINVQAAS

SEQ ID NO: 68160 - protein, 274 aa, Bacillus pumilus
AQTVPYGIPQIKAPAVHAQGYKGANVKVAVLDTGIHAAHPDLNVAGGASFVPSEPNATQDFQSHGTHVAGTIAALDNTIGVLGVAPSASLYAVKVLDRYGDGQYSWIISGIEWAVANNMDVINMSLGGPSGSTALKNAVDTANNRGVVVVAAAGNSGSSGSSSTVGYPAKYDSTIAVANVNSNNVRNSSSSAGPELDVSAPGTSILSTVPSSGYTSYTGTSMASPHVAGAAALILSKNPNLTNSQVRQRLENTATPLGDSFYYGKGLINVQAAS

SEQ ID NO: 68161 - protein, 274 aa, Bacillus pumilus
AQTVPYGIPQIKAPAVHAQGYKGANVKVAVLDTGIHAAHPDLNVAGGASFVPSEPNATQDFQSHGTHVAGTIAALDNTIGVLGVAPSASLYAVKVLDRNGDGQYSWIISGIEWAVANNMDVINMSLGGPNGSTALKNAVDTANNRGVVVVAAAGNSGSFGSTSTVGYPAKYDSTIAVANVNSNNVRNSSSSAGPELDVSAPGTSILSTVPSSGYTSYTGTSMASPHVAGAAALILSKYPNLSTSQVRQRLENTATPLGDSFYYGKGLINVQAAS

SEQ ID NO: 68162 - protein, 274 aa, Bacillus xiamenensis
AQVVPYGIPQIKAPAVHAQGYKGANVKVAVLDTGIHAAHPDLNVAGGASFVPSEPNATQDFQSHGTHVAGTIAALDNNIGVLGVAPSASLYAVKVLDRNGDGQYSWIISGIEWAVANNMDVINISLGGPSGSTALKNAVDTANNRGVVVVAAAGNSGSSGSTSTVQYPAKYDSTIAVANVNSNNVRNSSSSAGPELDVSAPGTSILSTVPSSGYASYTGTSMASPHVAGAAALILSKHPNLTNTQVRQRLENTATPLGSSFYYGKGLINVQAAA

SEQ ID NO: 68163 - protein, 274 aa, Unidentified
AQTVPYGIPQIKAPAVHAQGYKGANVKVAVLDTGIHAAHPDLNVAGGASFVPSEPNATQDFQSHGTHVAGTIAALDNTIGVLGVAPSASLYAVKVLDRYGDGQYSWIISGIEWAVANNMDVINMSLGGPNGSTALKNAVDTANNRGVVVVAAAGNSGSTGSTSTVGYPAKYDSTIAVANVNSNNVRNSSSSAGPELDVSAPGTSILSTVPSSGYTSYTGTSMASPHVAGAAALILSKYPNLSTSQVRQRLENTATPLGNSFYYGKGLINVQAAS

SEQ ID NO: 68164 - protein, 274 aa, Bacillus pumilus
AQTVPYGIPQIKAPAVHAQGYKGANVKVAVLDTGIHAAHPDLNVAGGASFVPSEPNATQDFQSHGTHVAGTIAALDNTIGVLGVAPSASLYAVKVLDRNGDGQYSWIISGIEWAVANNMDVINMSLGGASGSTALKNAVDTANNRGVVVVAAAGNSGSSGSRSTVGYPAKYESTIAVANVNSNNVRNSSSSAGPELDVSAPGTSILSTVPSSGYTSYTGTSMASPHVAGAAALILSKNPNLTNSQVRQRLENTATPLGDSFYYGKGLINVQAAS

SEQ ID NO: 68165 - protein, 274 aa, Bacillus pumilus
AQTVPYGIPQIKAPAVHAQGYKGANVKVAVLDTGIHAAHPDLNVAGGASFVPSEPNATQDFQSHGTHVAGTIAALDNTIGVLGVAPSASLYAVKVLDRYGDGQYSWIISGIEWAVANNMDVINMSLGGPNGSTALKKAVDTANNRGVVVVAAAGNSGSTGSTSTVGYPAKYDSTIAVANVNSNNVRNSSSSAGPELDVSAPGTSILSTVPSSGYTSYTGTSMASPHVAGAAALILSKYPNLSTSQVRQRLENTATPLGNSFYYGKGLINVQAAS

SEQ ID NO: 68166 - protein, 274 aa, Bacillus pumilus
AQTVPYGIPQIKAPAVHAQGYKGANVKVAVLDTGIHAAHPDLNVAGGASFVPSEPNATQDFQSHGTHVAGTIAALDNTIGVLGVAPSASLYAVKVLDRNGDGQYSWIISGIEWAVANNMDVINMSLGGPDGSTALKNAVDTANKRGVVVVAAAGNSGSTGSTSTVGYPAKYDSTIAVANVNSSNVRNSSSSVGPELDVSAPGTSILSTVPSSGYTSYTGTSMASPHVAGAAALILSKNPNLSNSQVRQRLETTATPLGNSFYYGKGLINAEAAS

SEQ ID NO: 68167 - protein, 274 aa, Bacillus pumilus
AQTVPYGIPQIKAPAVHAQGYKGANVKVAVLDTGIHAAHPDLNVAGGASFVPSEPNATQDFTSHGTHVAGTIAALDNTIGVLGVAPSASLYAVKVLDRYGDGQYSWIISGIEWAVANNMDVINMSLGGPSGSTALKNAVDTANNRGVVVVAAAGNSGSSGSSSTVGYPAKYDSTIAVANVNSNNVRNSSSSAGPELDVSAPGTSILSTVPSSGYTSYTGTSMASPHVAGAAALILSKNPNLTNSQVRQRLENTATPLGDSFYYGKGLINVQAAS

SEQ ID NO: 68168 - protein, 274 aa, Bacillus xiamenensis
AQVVPYGIPQIKAPAVHAQGYKGANVKVAVLDTGIHAAHPDLNVAGGASFVPSEPNATQDFQSHGTHVAGTIAALDNTIGVLGVAPSASLYAVKVLDRNGDGQYSWIISGIEWAVANNMDVINISLGGPSGSTALKNAVDTANNRGVVVVAAAGNSGSSGSTSTVQYPAKYDSTIAVANVNSNNVRNSSSSAGPELDVSAPGTSILSTVPSSGYASYTGTSMASPHVAGAAALILSKHPNLTNTQVRQRLENTATPLGPSFYYGKGLINVQAAA

SEQ ID NO: 68169 - protein, 274 aa, Brevibacillus parabrevis
AQTVPYGIPQIKAPAVHAQGYKGANVKVAVLDTGIHAAHPDLNVAGGASFVPSEPNATQDFQSHGTHVAGTIAALDNTIGVLGVAPSASLYAVKVLDRYGDGQYSWIISGIEWAVANNMDVINMSLGGPSGSTALKNTVDTANNRGVVVVAAAGNSGSSGSSSTVGYPAKYDSTIAVANVDSNNVRNSSSSAGPELDVSAPGTSILSTVPSSGYTSYTGTSMASPHVAGAAALILSKNPNLTNSQVRQRLENTATPLGDSFYYGKGLINVQAAS

SEQ ID NO: 68170 - protein, 274 aa, Bacillus sp.
AQTVPYGIPQIKAPAVHAQGYKGANVKVAVLDTGIHAAHPDLNVAGGASFVPSEPNATQDFQSHGTHVAGTIAALDNTIGVLGVAPSASLYAVKVLDRYGDGQYSWIISGIEWAVANNMDVINMSLGGPSGSTALKNAVDTANNRGVVVVAAAGNSGSSGSSSTVGYPAKYDSTIAVANVNSNNVRDSSSSAGPELDVSAPGTSILSTVPSSGYTSYTGTSMASPHVAGAAALILSKNPNLTNSQVRQRLENTATPLGDSFYYGKGLINVQAAS

SEQ ID NO: 68171 - protein, 274 aa, Bacillus pumilus
AQTVPYGIPQIKAPAVHAQGYKGANVKVAVLDTGIHAAHPDLNVAGGASFVPSEPNETQDFQSHGTHVAGTIAALDNTIGVLGVAPSASLYAVKVLDRYGDGQYSWIISGIEWAVANNMDVINMSLGGPSGSTALKNAVDTANNRGVVVVAAAGNSGSSGSSSTVGYPAKYDSTIAVANVNSNNVRNSSSSAGPELDVSAPGTSILSTVPSSGYTSYTGTSMASPHVAGAAALILSKNPNLTNSQVRQRLENTATPLGDSFYYGKGLINVQAAS

SEQ ID NO: 68172 - protein, 274 aa, Bacillus xiamenensis
AQTVPYGIPQIKAPAVHAQGYKGANVKVAVLDTGIHAAHPDLNVAGGASFVPSEPNATQDFQSHGTHVAGTIAALDNNIGVLGVAPSASLYAVKVLDRNGDGQYSWIISGIEWAVANNMDVINISLGGPSGSTALKNAVDTANNRGVVVVAAAGNSGSSGSTSTVQYPAKYDSTIAVANVNSNNVRNSSSSAGPELDVSAPGTSILSTVPSSGYASYTGTSMASPHVAGAAALILSKHPNLTNTQVRQRLENTATPLGPSFYYGKGLINVQAAA

SEQ ID NO: 68173 - protein, 274 aa, Bacillus xiamenensis
AQVVPYGIPQIKAPAVHAQGYKGANVKVAVLDTGIHAAHPDLNVAGGASFVPSEPNATQDFQSHGTHVAGTIAALDNTIGVLGVAPSASLYAVKVLDRNGDGQYSWIISGIEWAVANNMDVINISLGSPSGSTALKNAVDTANNRGVVVVAAAGNSGSSGSTSTVGYPAKYDSTIAVANVNSNNVRNSSSSAGPELDVSAPGTSILSTVPSSGYASYTGTSMASPHVAGAAALILSKHPNLTNTQVRQRLENTATPLGPSFYYGKGLINVQAAA

SEQ ID NO: 68174 - protein, 274 aa, Bacillus xiamenensis
AQTVPYGIPQIKAPAVHAQGYKGANVKVAVLDTGIHAAHPDLNVAGGASFVPSEPNATQDFQSHGTHVAGTIAALDNNIGVLGVAPSASLYAVKVLDRNGDGQYSWIISGIEWAVANNMDVINISLGSPSGSTALKNAVDTANNRGVVVVAAAGNSGSSGSTSTVGYPAKYDSTIAVANVNSNNVRNSSSSAGPELDVSAPGTSILSTVPSSGYASYTGTSMASPHVAGAAALILSKHPNLTNTQVRQRLENTATPLGPSFYYGKGLINVQAAA

SEQ ID NO: 68175 - protein, 268 aa, Bacillus subtilis
AGSVPTGISAVGAPAAHAAGLAGSGVLVAVLATGISTHPALAIAGGASPVPGGPSTGAGAGHGTHVAGTIAALAASIGVLGVAPAAGLTAVLVLGASGSGSVSSIAGGLGTAGAAGMHVAALSLGSPSPSATLGGAVASATSAGVLVVAASGASGAGSISTPAATAAAMAVGATAGAAAAASPSGTGAGLAIVAPGVALLSTTPGSTTASLAGTSMATPHVAGAAALVLGLAPSTSAVGIAAHLLATATSLGATTGTGSGLVAAGAAT

SEQ ID NO: 68176 - protein, 275 aa, Bacillus sp. KSM-KP43
AQSTPWGITHINAHKAHAANVTGSGVKVAVLDTGIDASHPDLNVKGGVSFVSGEPSGLTDGNGHGTHVAGTVAALNNTAGVVGVAYNADLYAVKVLSASGSGTLSGIAQGIEWAIANDMDVSNMSLGGSSGSTALKQACDNAYASGIVVVAAAGNSGTKGNQNTIGYPARYSSVIAVGAVDSNNNRASFSSVGAELEVMAPGVSVLSTTPGNTYSSFNGTSMASPHVAGAAALIKAKYPSLTASQIRDRLKNTTTPLGDAFYYGKGVINVEKALQ

SEQ ID NO: 68177 - protein, 275 aa, Bacillus atrophaeus
AQSVPYGISQIKAPAVHSQGYTGSNVKVAVIDSGIDSSHPDLKVSGGASFVPSEPNPFQDGNSHGTHVAGTVAALNNSVGVLGVAPSASLYAVKVLSSSGSGDYSWIINGIEWAISNNMDVINMSLGGPQGSTALKAVVDKAVSQGIVVVAAAGNSGSSGSTSTVGYPAKYPSVIAVGAVDSNNQRASFSSAGSELDVMAPGVSIQSTLPGSSYGSYNGTSMASPHVAGAAALVLSKHPNWTNSQVRNSLESTATNLGNSFYYGKGLINVQAAAQ

SEQ ID NO: 68178 - protein, 275 aa, Bacillus sp. KSM-9865
AQSTPWGITHINAHKAHAANVTGSGVKVAVLDTGIDASHPDLNVKGGVSFVSGEPSGLTDGNGHGTHVAGTVAALNNTAGVVGVAYNADLYAVKVLSASGSGTLSGIAQGIEWAIANDMDIINMSLGGSSGSTALKQACDNAYASGIVVVAAAGNSGTKGNQNTIGYPARYSSVIAVGAVDSNNNRASFSSVGAELEVMAPGVSVLSTTPGNTYSSFNGTSMASPHVAGAAALIKAKYPSLTASQIRDRLKNTTTALGDAFYYGKGVINVEKALQ

SEQ ID NO: 68179 - protein, 356 aa, Unidentified
AEEKVKYLIGFEEEAELEAFTEEIDQVGVFSVEEQSVAEDTLDIDVDIIDEYDYIDVLAVELDPEDVDALSEEAGISFIEEDIELSIQQTVPWGITRVQAPAVHNRGVTGSGVRVAILDSGISTHSDLTIRGGASFVPGEPTTADLNGHGTHVAGTVAALNNSIGVIGVAPSADLYAVKVLGANGRGSVSGIAQGLEWAAANNMHIANMSLGSDAPSTTLERAVNYATSQGVLVIAATGNNGSGSVGYPARYANAMAVGATDQNNRRANFSQYGTGIDIVAPGVNVQSTYPGNRYASLNGTSMATPHVAGAAALVKQRYPSWNATQIRNHLKNTATNLGNSSQFGSGLVNAEAATR

SEQ ID NO: 68180 - protein, 274 aa, Bacillus pumilus
AQTVPYGIPQIKAPAVHAQGYKGANVKVAVLDTGIHAAHPDLNVAGGASFVPSEPNATQDFQSHGTHVAGTIAALDNTIGVLGVAPSASLYAVKVLDRNGDGQYSWIISGIEWAVANNMDVINMSLGGPDGSTALKNAVDTANKRGVVVVAAAGNSGSTGSTSTVGYPAKYDSTIAVANVNSSNVRNSSSSAGPELDVSAPGTSILSTVPSSGYTSYTGTSMASPHVAGAAALILSKNPNLSNSQVRQRLETTATPLGNSFYYGKGLINAEAAS

SEQ ID NO: 68181 - protein, 274 aa, Brevibacillus parabrevis
AQTVPYGIPQIKAPAVHAQGYKGANVKVAVLDTGIHAAHPDLNVAGGASFVPSEPNATQDFQSHGTHVAGTIAALDNTIGVLGVAPSASLYAVKVLDRYGDGQYSWIISGIEWAVANNMDVINMSLGGPSGSTALKNTVDTANNRGVVVVAAAGNSGSSGSSSTVGYPAKYDSTIAVANVNSNNVRNSSSSAGPELDVSAPGTSILSTVPSSGYTSYTGTSMASPHVAGAAALILSKNPNLTNSQVRQRLENTATPLGDSFYYGKGLINVQAAS

SEQ ID NO: 68182 - protein, 274 aa, Bacillus pumilus
AQTVPYGIPQIKAPAVHAQGYKGANVKVAVLDTGIHAAHPDLNVAGGASFVPSEPNATQDFQSHGTHVAGTIAALDNTIGVLGVAPSASLYAVKVLDRNGEGQYSWIISGIEWAVANNMDVINMSLGGPDGSTALKNAVDTANKRGVVVVAAAGNSGSTGSTSTVGYPAKYDSTIAVANVNSSNVRNSSSSAGPELDVSAPGTSILSTVPSSGYTSYTGTSMASPHVAGAAALILSKNPNLSNSQVRQRLETTATPLGNSFYYGKGLINAEAAS

SEQ ID NO: 68183 - protein, 274 aa, Bacillus sp.
AQTVPYGIPQIKAPAVHAQGYKGANVKVAVLDTGIHAAHPDLNVAGGASFVPSEPNATQDFQSHGTHVAGTIAALDNTIGVLGVAPSASLYAVKVLDRYGDGQYSWIISGIEWAVANNMDVINMSLGGPSGSTALKNAVDTANNRGVVVVAAAGNSGSSGSSSTVGYPAKYDSTIAVANVNSSNVRDSSSSAGPELDVSAPGTSILSTVPSSGYTSYTGTSMASPHVAGAAALILSKNPNLTNSQVRQRLENTATPLGDSFYYGKGLINVQAAS

SEQ ID NO: 68184 - protein, 274 aa, Unidentified
AQTVPYGIPQIKAPAVHAQGYKGANVKVAVLDTGIHAAHPDLNVAGGASFVPSEPNATQDFQSHGTHVAGTIAALDNTIGVLGVAPSASLYAVKVLDRNGDGQYSWIISGIEWAVANNMDVINMSLGGPNGSTALKNAVDTANNRGVVVVAAAGNSGSTGSTSTVGYPAKYDSTIAVANVNSSNVRNSSSSAGPELDVSAPGTSILSTVPSRGYTSYTGTSMASPHVAGAAALILSKNPNLSNSQVRQRLENTATPLGNSFYYGKGLINVQAAS

SEQ ID NO: 68185 - protein, 274 aa, Bacillus pumilus
AQTVPYGITQIKAPAVHAQGYKGANVKVAVLDTGIHAAHPDLNVAGGASFVPSEPNATQDFQSHGTHVAGTIAALDNTIGVLGVAPSASLYAVKVLDRNGDGQYSWIISGIEWAVANNMDVINMSLGGPDGSTALKNAVDTANKRGVVVVAAAGNSGSTGSTSTVGYPAKYDSTIAVANVNSSNVRNSSSSVGPELDVSAPGTSILSTVPSSGYTSYTGTSMASPHVAGAAALILSKNPNLSNSQVRQRLETTATPLGNSFYYGKGLINAEAAS

SEQ ID NO: 68186 - protein, 274 aa, Bacillus pumilus
AQTVPYGIPQIKAPAVHAQGYKGANVKVAVLDTGIHAAHPDLNVAGGASFVPSEPNATQDFQSHGTHVAGTIAALDNTIGVQGVAPSASLYAVKVLDRYGDGQYSWIISGIEWAVANNMDVINMSLGGPSGSTALKNAVDTANNRGVVVVAAAGNSGSSGSSSTVGYPAKYDSTIAVANVNSNNVRNSSSSAGPELDVSAPGTSILSTVPSSGYTSYTGTSMASPHVAGAAALILSKNPNLTNSQVRQRLENTATPLGDSFYYGKGLINVQAAS

SEQ ID NO: 68187 - protein, 274 aa, Bacillus pumilus
AQTVPYGIPQIKAPAVHAQGYKGANVKVAVLDTGIHAAHPDLNVAGGASFVPSEPNATQDFQSHGTHVAGTIAALDNTIGVLGVAPNASLYAVKVLDRNGDGQYSWIISGIEWAVANNMDVINMSLGGPSGSTALKNAVDTANNRGVVVVAAAGNSGSSGSRSTVGYPAKYDSTIAVANVNSNNVRNSSSSAGPELDVSAPGTSILSTVPSSGYTSYTGTSMASPHVAGAAALILSKNPNLTNSQVRQRLENTATPLGDSFYYGKGLINVQAAS

SEQ ID NO: 68188 - protein, 274 aa, Bacillus pumilus
AQTVPYGITQIKAPAVHAQGYKGANVKVAVLDTGIHAAHPDLNVAGGASFVPSEPNATQDFQSHGTHVAGTIAALDNTIGVLGVAPSASLYAVKVLDRNGDGQYSWIISGIEWAVANNMDVINMSLGGPDGSTALKNAVDTANKRGVVVVAAAGNSGSTGSTSTVGYPAKYDSTIAVANVNSSNVRNSSSSVGPELDVSAPGTSILSTVPSSGYTSMTGTSMASPHVAGAAALILSKNPNLSNSQVRQRLETTATPLGNSFYYGKGLINAEAAS

SEQ ID NO: 68189 - protein, 274 aa, Bacillus pumilus
AQTVPYGIPQIKAPAVHAQGYKGANVKVAVLDTGIHAAHPDLNVAGGASFVPSEPNATQDFQSHGTHVAGTIAALDNTIGVLGVAPSASLYAVKVLDRNGDGQYSWIISGIEWAVANNMDVINMSLGGPNGSTALKNAVDTANNRGVVVVAAAGNSGSTGSTSTVGYPAKYDSTIAVANVNSSNVRNSSSSAGPELDVSAPGTSILSTVPSSGYTSYTGTSMASPHVAGAAALILSKNPNLSNSQVRQRLENTATPLGNSFYYGKGLINAEAAS

SEQ ID NO: 68190 - protein, 274 aa, Bacillus pumilus
AQTVPYGIPQIKAPAVHAQGYKGANVKVAVLDTGIHAAHPDLNVAGGASFVPSEPNATQDFQSHGTHVAGTIAALDNTIGVLGVAPSASLYAVKVLDRNGDGQYSWIISGIEWAVANNMDVINMSLGGPNGSTALKNAVDTANNRGVVVVAAAGNSGSFGSTSTVGYPAKYDSTIAVANVNGNNVRNSSSSAGPELDVSAPGTSILSTVPSSGYTSYTGTSMASPHVAGAAALILSKYPNLSTSQVRQRLENTATPLGDSFYYGKGLINVQAAS

SEQ ID NO: 68191 - protein, 274 aa, Bacillus pumilus
AQTVPYGIPQIKAPAVHAQGYKGANVKVAVLDTGIHAAHPDLNVAGGASFVPSEPNATQDFQSHGTHVATTIAALDNTIGVLGVAPSASLYAVKVLDRYGDGQYSWIISGIEWAVANNMDVINMSLGGPNGSTALKNAVDSANNRGVVVVAAAGNSGSTGSTSTVGYPAKYDSTIAVANVNSNNVRNTSSSAGPELDVSAPGTSILSTVPSSGYTSYTGTSMASPHVAGAAALILSKYPNLSTSQVRQRLENTATPLGSSFYYGKGLINVQAAS

SEQ ID NO: 68192 - protein, 274 aa, Brevibacillus parabrevis
AQTVPYGIPQIKAPAVHAQGYKGANVKVAVLDTGIHAAHPDLNVAGGASFVPSEPNATQDFQSHGTHVAGTIAALDNTIGVLGVAPSASLYAVKVLDRYGDGQYSWIISGIEWAVANNMDVINMSLGGPSGSTALKNTVDTANNRGVVVVAAAGNSGSSGSSSTVGYPAKYDSTIAVANVNSNNVRNSSSSAGPELDVSAPGTSILSTVPSSGYTSSTGTSMASPHVAGAAALILSKNPNLTNSQVRQRLENTATPLGDSFYYGKGLINVQAAS

SEQ ID NO: 68193 - protein, 356 aa, Unidentified
AEEKVKYLIGFEEEAELEAFTEEIDQVGVFSVEEQSVAEDTLDIDVDIIDEYDYIDVLAVELDPEDVDALSEEAGISFIEEDIELSIQQTVPWGITRVQAPAVHNRGITGSGVRVAILDSGISAHSDLNIRGGASFVPGEPTTADLNGHGTHVAGTVAALNNSIGVIGVAPNAELYAVKVLGANGSGSVSGIAQGLEWAATNNMHIANMSLGSDFPSSTLERAVNYATSRDVLVIAATGNNGSGSVGYPARYANAMAVGATDQNNRRANFSQYGTGIDIVAPGVNVQSTYPGNRYVSMNGTSMATPHVAGAAALVKQRYPSWNATQIRNHLKNTATNLGNSSQFGSGLVNAEAATR

SEQ ID NO: 68194 - protein, 275 aa, Bacillus subtilis
AQTTPWGITHINAHKAHSSSVTGSGVKVAVLDTGIDASHPDLNVKGGASFISGEPNALVDTNGHGTHVAGTVAALDNTIGVVGVAYNADLYAVKVLSASGSGTLSGIAQGVEWAIANNMDVINMSLGGSSGSTALKQAVDNAYASGIVVVAAAGNSGTRGRQNTMGYPARYSSVIAVGAVDSNNNRASFSSVGAELEVMAPGVSVLSTVPGGGYASYNGTSMASPHVAGAAALIKAKYPSLSASQIRDRLRNTATYLGPPFYYGNGVINVERALQ

SEQ ID NO: 68195 - protein, 275 aa, Bacillus subtilis
AQTTPWGIEHINAHKAHSSSVTGSGVKVAVLDTGIDASHPDLNVKGGASFISGEPNALVDTNGHGTHVAGTVAALDNTIGVVGVAYNADLYAVKVLSASGSGTLSGIAQGVEWAIANNMDVINMSLGGSSGSTALKQAVDNAYASGIVVVAAAGNSGTRGRQNTMGYPARYSSVIAVGAVDSNNNRASFSSVGAELEVMAPGVSVLSTVPGGGYASYNGTSMASPHVAGAAALIKAKYPSLSASQIRDRLRNTATYLGDPFYYGNGVINVERALQ

SEQ ID NO: 68196 - protein, 275 aa, Unidentified
AQTVPWGIPHIKADKAHAAGVTGSGVKVAILDTGIDANHADLNVRGGASFVAGEPNALQDGNGHGTHVAGTVAALNNSTGVLGVAYNADLYAVKVLSASGSGTLSGIAQGIEWSIANGMDVINMSLGGSSGSTALQQACNNAYNRGIVVIAAAGNSGSSGNRNTIGYPARYSSVIAVGAVDSNNNRASFSSVGNELEVMAPGANILSTTPGNNYASFNGTSMAAPHVAGAAALIKAKYPSMTNVQIRDRLRNTATNLGDPFFYGNGVINVESALQ

SEQ ID NO: 68197 - protein, 275 aa, Bacillus subtilis
AQTTPWGIEHINAHKAHSSSVTGSGVKVAVLDTGIDASHPDLNVKGGASFISGEPNALVDTNGHGTHVAGTVAALDNTIGVVGVAYNADLYAVKVLSASGSGTLSGIAQGVEWAIANNMDVINMSLGGSSGSTALKQAVDNAYASGIVVVAAAGNSGTRGRQNTMGYPARYSSVIAVGAVDSNNNRASFSSVGAELEVMAPGVSVLSTVPGGGYASYNGTSMASPHVAGAAALIKAKYPSLSASQIRDRLRNTATYLGPPFYYGNGVINVERALQ

SEQ ID NO: 68198 - protein, 275 aa, Bacillus subtilis
AQTTPWGITHINAHKAHSSSVTGSGVKVAVLDTGIDASHPDLNVKGGASFISGEPNALVDTNGHGTHVAGTVAALDNTIGVVGVAYNADLYAVKVLSASGSGTLSGIAQGVEWAIANNMDVINMSLGGPSGSTALKQAVDNAYASGIVVVAAAGNSGTRGRQNTMGYPARYSSVIAVGAVDSNNNRASFSSVGAELEVMAPGVSVLSTVPGGGYASYNGTSMASPHVAGAAALIKAKYPSLSASQIRDRLRNTATYLGDPFYYGNGVINVERALQ

SEQ ID NO: 68199 - protein, 275 aa, Bacillus subtilis
AQTTPWGITHINAHKAHSSSVTGSGVKVAVLDTGIDASHPDLNVKGGASFISGEPNALVDTNGHGTHVAGTVAALDNTIGVVGVAYNADLYAVKVLSASGSGTLSGIAQGVEWAIANNMDVINMSLGGSSGSTALKQAVDNAYASGIVVVAAAGNSGTRGRQNTMGYPARYSSVIAVGAVDSNNNRASFSSVGAELEVMAPGVSVLSTVPGGGYASYNGTSMASPHVAGAAALIKAKYPSLSASQIRDRLRNTATYLGDPFYYGNGVINVERALQ

SEQ ID NO: 68200 - protein, 275 aa, Bacillus sp.
AQTVPWGIPHIKADKAHAAGVTGSGVKVAILDTGIDANHADLNVKGGASFVSGEPNALQDGNGHGTHVAGTVAALNNTTGVLGVAYNADLYAVKVLSASGSGTLSGIAQGIEWSVANGMNVINMSLGGSSGSSALQQACDNAYARGIVVVAAAGNSGSRGKQNTIGYPARYSSVIAVGAVDSSNNRASFSSVGNELEVMAPGVNILSTTPGNNYASFNGTSMASPHVAGAAALIKAKYPSMSNVQIRDRLKNTATNLGDPFFYGKGVINVESALQ

SEQ ID NO: 68201 - protein, 362 aa, Bacillus subtilis
TDSASAAEEKVKYLIGFEEEAELEAFTEEIDQVGVFSVEEQSVAEDTLDIDVDIIDEYDYTDVLAVELDPEDVDALSEEAGISFIEEDIELSIQQTVPWGITRVQAPAVHNRGITGSGVRVAILDSGISAHSDLNIRGGASFVPGEPTTADLNGHGTHVAGTVAALNNSIGVIGVAPNAELYAVKVLGANGSGSVSGIAQGLEWAATNNMHIANMSLGSDFPSSTLERAVNYATSRDVLVIAATGNNGSGSVGYPARYANAMAVGATDQNNRRANFSQYGTGIDIVAPGVNVQSTYPGNRYVSMNGTSMATPHVAGAAALVKQRYPSWNATQIRNHLKNTATNLGNSSQFGSGLVNAEAATR

SEQ ID NO: 68202 - protein, 274 aa, Bacillus pumilus
AQTVPYGITQIKAPAVHAQGYKGANVKVAVLDTGIHAAHPDLNVAGGASFVPSEPNATQDFQSHGTHVAGTIAALDNTIGVLGVAPSASLYAVKVLDRNGDGQYSWIISGIEWAVANNMDVINMSLGGPDGSAALKNAVDTANKRGVVVVAAAGNSGSTGSTSTVGYPAKYDSTIAVANVNSSNVRNSSSSAGPELDVSAPGTSILSTVPSSGYASYTGTSMASPHVAGAAALILSKNPNLSNSQVRQRLETTATPLGNSFYYGKGLINAEAAS

SEQ ID NO: 68203 - protein, 274 aa, Bacillus pumilus
AQTVPYGITQIKAPAVHAQGYKGANVKVAVLDTGIHAAHPDLNVAGGASFVPSEPNATQDFQSHGTHVAGTIAALDNTIGVLGVAPSASLYAVKVLDRNGEGQYSWIISGIEWAVANNMDVINMSLGGPKGSTALKNAVDTANNRGVVVVAAAGNSGSTGSTSTVGYPAKYDSTIAVANVNSSNVRNSSSSAGPELDVSAPGTSILSTVPSSGYTCYTGTSMASPHVAGAAALILSKNPNLSNSQVRQRLENTATPLGNSFYYGKGLINAEAAS

SEQ ID NO: 68204 - protein, 274 aa, Bacillus pumilus
AQTVPYGITQIKAPAVHAQGYKGANVKVAVLDTGIHAAHPDLNVAGGASFVPSEPNATQDFQSHGTHVAGTIAALDNTIGVLGVAPSASLYAVKVLDRNGDGQYSWIISGIEWAVANNMDVINMSLGGPNGSTALKNAVDTANNRGVVVVAAAGNSGSTGSTSTVGYPAKYDSTIAVANVNSSNVRNSSSSAGPELDVSAPGTSILSTVPSSGYTSYTGTSMASPHVAGAAALILSKNPNLSNSQVRQRLENTATPLGNSFYYGKGLINAEAAS

SEQ ID NO: 68205 - protein, 274 aa, Bacillus pumilus SAFR-032
AQTVPYGIPQIKAPAVHAQGYKGANVKVAVLDTGIHAAHPDLNVAGGASFVPSEPNATQDFQSHGTHVAGTIAALDNTIGVLGVAPSASLYAVKVLDRYGDGQYSWIISGIEWAVANNMDVINMSLGGPNGSTALKNAVDTANNRGVVVVAAAGNSGSTGSTSTVGYPAKYDSTIAVANVNSSNVRNSSSSAGPELDVSAPGTSILSTVPSSGYTSYTGTSMASPHVAGAAALILSKYPNLSTTQVRQRLENTATPLGNSFYYGKGLINVQAAS

SEQ ID NO: 68206 - protein, 274 aa, Bacillus pumilus
AQTVPYGITQIKAPAVHAQGYKGANVKVAVLDTGIHAAHPDLNVAGGASFVPSEPNATQDFHSHGTHVAGTIAALDNTIGVLGVAPSASLYAVKVLDRNGDGQYSWIISGIEWAVANNMDVINMSLGGPNGSTALKNAVDTANNRGVVVVAAAGNSGSTGSTSTVGYPAKYDSTIAVANVNSSNVRNSSSSAGPELDVSAPGTSILSTVPSSGYTCYTGTSMASPHVAGAAALILSKNPNLSNSQVRQRLENTATPLGNSFYYGKGLINAEAAS

SEQ ID NO: 68207 - protein, 274 aa, Bacillus pumilus
AQTVPYGITQIKAPAVHAQGYKGANVKVAVLDTGIHAAHPDLNVAGGASFVPSEPNATQDFQSHGTHVAGTIAALDNTIGVLGVAPSASLYAVKVLDRNGDGQYSWIISGIEWAVANNMDVINMSLGGPDGSTALKNAVDTANKRGVVVVAAAGNSGSTGSTSTVGYPAKYDSTIAVANVNSSNVRNSSSSAGPELDVSAPGTSILSTVPSSGYTSYTGTSMASPHVAGAAALILSKNPNLSNSQVRQRLETTATPLGNSFYYGKGLINAEAAS

SEQ ID NO: 68208 - protein, 274 aa, Bacillus pumilus
AQTVPYGITQIKAPAVHAQGYKGANVKVAVLDTGIHAAHPDLNVAGGASFVPSEPNATQDFSSHGTHVAGTIAALDNTIGVLGVAPSASLYAVKVLDRNGDGQYSWIISGIEWAVANNMDVINMSLGGPDGSTALKNAVDTANKRGVVVVAAAGNSGSTGSTSTVGYPAKYDSTIAVANVNSSNVRNSSSSAGPELDVSAPGTSILSTVPSSGYTSYTGTSMASPHVAGAAALILSKNPNLSNSQVRQRLETTATPLGNSFYYGKGLINAEAAS

SEQ ID NO: 68209 - protein, 274 aa, Bacillus pumilus
AQTVPYGITQIKAPAVHAQGYKGANVKVAVLDTGIHAAHPDLNVAGGASFVPSEPNATQDFQSHGTHVAGTIAALDNTIGVLGVAPSASLYAVKVLDRNGDGQYSWIISGIEWAVANNMDVINMSLGGPDGSTALKKAVDTANKRGVVVVAAAGNSGSTGSTSTVGYPAKYDSTIAVANVNSSNVRNSSSSAGPELDVSAPGTSILSTVPSSGYTSYTGTSMASPHVAGAAALILSKNPNLSNSQVRQRLETTATPLGNSFYYGKGLINAEAAS

SEQ ID NO: 68210 - protein, 274 aa, Bacillus pumilus
AQTVPYGIPQIKAPAVHAQGYKGANVKVAVLDTGIHAAHPDLNVAGGASFVPSEPNATQDFESHGTHVAGTIAALDNTIGVLGVAPSASLYAVKVLDRNGDGQYSWIISGIEWAVANNMDVINMSLGGPDGSTALKNAVDTANNRGVVVVAAAGNSGSTGSTSTVGYPAKYDSTIAVANVNSSNVRNSSSSAGPELDVSAPGTSILSTVPSSGYTSYTGTSMASPHVAGAAALILSKNPNLSNSQVRQRLENTATPLGNSFYYGKGLINAQAAS

SEQ ID NO: 68211 - protein, 275 aa, Bacillus subtilis
AQSVPYGISQIKAPALHSQGYTGSNVKVAVIDSGIDSSHPDLNVRGGASFVPSETNPYQDGSSHGTHVAGTVAALNNTIGVLGVAPSASLYAVKVLDSTGSGQYSWIINGIEWAISNNMDVINMSLGGPTGSTALKTVVDKAVASGIVVVAAAGNEGSSGSTSTVGYPAKYPSTIAVGAVNSSNQRASFSSAGSELDVMAPGVSIQSTLPGGTYGSYNGTSMATPHVAGAAALILSKHPTWSNAQVRDRLESTATNLGSSFYYGKGLINVQAAAQ

SEQ ID NO: 68212 - protein, 274 aa, Bacillus pumilus
AQTVPYGIPQIKAPAVHAQGYKGANVKVAVLDTGIHAAHPDLNVAGGASFVPSEPNATQDFQSHGTHVAGTIAALDNTIGVLGVAPNASLYAVKVLDRNGDGQYSWIISGIEWAVANNMDVINMSLGGPSGSTALKNAVDTANNRGVVVVAAAGNSGSSGSRSTVGYPAKYDSTIAVANVNSSNVRNSSSSAGPELDVSAPGTSILSTVPSSGYTSYTGTSMASPHVAGAAALILSKNPNLTNSQVRQRLENTATPLGDSFYYGKGLINVQAAS

SEQ ID NO: 68213 - protein, 275 aa, Bacillus mojavensis
AQSVPYGISQIKAPALHSQGYTGSNVKVAVIDSGIDSSHPDLNVRGGASFVPSETNPYQDGSSHGTHVAGTVAALNNTIGVLGVAPSASLYAVKVLDSTGSGQYSWIINGIEWAISNNMDVINMSLGGPTGSTALKTVVDKAVASGIVVVAAAGNEGSSGSTSTVGYPAKYPSTIAVGAVNSSNQRASFSSAGSELDVMAPGVSIQSTLPGGTYGAYNGTSMATPHVAGAAALILSKHPTWTNAQVRDRLESTATYLGSSFYYGKGLINVQAAAQ

SEQ ID NO: 68214 - protein, 274 aa, Bacillus pumilus
AQTVPYGIPQIKAPAVHAQGYKGANVKVAVLDTGIHAAHPDLNVAGGASFVPSEPNATQDFQSHGTHVAGTIAALDNTIGVLGVAPSASLYAVKVLDRNGDGQYSWIISGIEWAVANNMDVINMSLGGPNGSTALKNAVDTANNRGVVVVAAAGNSGSTGSTSTVGYPAKYDSTIAVANVNSSNVRNSTSSAGPELDVSAPGTSILSTVPSSGYTSYTGTSMASPHVAGAAALILSKNPNLSNSQVRQRLENTATPLGNSFYYGKGLINAQAAS

SEQ ID NO: 68215 - protein, 274 aa, Bacillus pumilus
AQTVPYGIPQIKAPAVHAQGYKGANVKVAVLDTGIHAAHPDLNVAGGASFVPSEPNATQDFQSHGTHVAGTIAALDNTIGVLGVAPSASLYAVKVLDRNGDGQYSWIISGIEWAVANNMDVINMSLGGPNGSTALKNAVDTANNRGVVVVAAAGNSGSTGSTSTVGYPAKYDSTIAVANVNSSNVRNSSSSAGPELDVSAPGTSILSTVPSSGYTSYTGTSMASPHVAGAAALILSKNPNLSNSQVRQRLENTATPLGNSFYYGKGLINAQAAS

SEQ ID NO: 68216 - protein, 274 aa, Bacillus pumilus
AQTVPYGITQIKAPAVHAQGYKGANVKVAVLDTGIHAAHPDLNVAGGASFVPSEPNATQDFQSHGTHVAGTIAALDNTIGVLGVAPSASLYAVKVLDRNGDGQYSWIISGIEWAVANNMDVINMSLGGPDGSAALKNAVDTANKRGVVVVAAAGNSGSTGSTSTVGYPAKYDSTIAVANVNSSNVRNSSSSAGPELDVMAPGTSILSTVPSSGYTSYTGTSMASPHVAGAAALILSKNPNLSNSQVRQRLETTATPLGNSFYYGKGLINAEAAS

SEQ ID NO: 68217 - protein, 274 aa, Bacillus pumilus
AQTVPYGITQIKAPAVHAQGYKGANVKVAVLDTGIHAAHPDLNVAGGASFVPSEPNATQDFQSHGTHVAGTIAALDNTIGVLGVAPSASLYAVKVLDRNGDGQYSWIISGIEWAVANNMDVINMSLGGPDGSTALKNAVDTANKRGVVVVAAAGNSGSTGSSSTVGYPAKYDSTIAVANVNSSNVRNSSSSVGPELDVSAPGTSILSTVPSSGYTSYTGTSMASPHVAGAAALILSKNPNLSNSQVRQRLETTATPLGNSFYYGKGLINAEAAS

SEQ ID NO: 68218 - protein, 274 aa, Bacillus pumilus
AQTVPYGITQIKAPAVHAQGYKGANVKVAVLDTGIHAAHPDLNVAGGASFVPSEPNATQDFQSHGTHVAGTIAALDNTIGVLGVAPSASLYAVKVLDRNGDGQYSWIISGIEWAVANNMDVINMSLGGPDGSTALKNAVDTANKRGVVVVAAAGNSGSTGSTSTVGYPAKYDSTIAVANVNSSNVRNSSSSAGPELDVSAPGTSILSTVPSSGYTSMTGTSMASPHVAGAAALILSKNPNLSNSQVRQRLETTATPLGNSFYYGKGLINAEAAS

SEQ ID NO: 68219 - protein, 274 aa, Bacillus pumilus
AQTVPYGIPQIKAPAVHAQGYKGANVKVAVLDTGIHAAHPDLNVAGGASFVPSEPNATQDFQSHGTHVAGTIAALDNTIGVLGVAPSASLYAVKVLDRNGDGQYSWIISGIEWAVANNMDVINMSLGGPDGSTALKNAVDTANNRGVVVVAAAGNSGSTGSTSTVGYPAKYDSTIAVANVNSSNVRNSSSSAGPELDVSAPGTSILSTVPSSGYTSYTGTSMASPHVAGAAALILSKNPNLSNSQVRQRLENTATPLGNSFYYGKGLINAQAAS

SEQ ID NO: 68220 - protein, 274 aa, Bacillus pumilus
AQTVPYGITQIKAPAVHAQGYKGANVKVAVLDTGIHAAHPDLNVAGGASFVPSEPNATQDFQSHGTHVAGTIAALDNTIGVLGVAPSASLYAVKVLDRNGDGQYSWIISGIEWAVANNMDVINMSLGGPDGSTALKNAVDTANKRGVVVVAAAGNSGSTGSSSTVGYPAKYDSTIAVANVNSSNVRNSSSSVGPELDVSAPGTSILSTVPSSGYTSMTGTSMASPHVAGAAALILSKNPNLSNSQVRQRLETTATPLGNSFYYGKGLINAEAAS

SEQ ID NO: 68221 - protein, 274 aa, Bacillus pumilus
AQTVPYGIPQIKAPAVHAQGYKGANVKVAVLDTGIHAAHPDLNVAGGASFVPSEPNATQDFESHGTHVAGTIAALDNTIGVLGVAPSASLYAVKVLDRNGDGQYSWIISGIEWAVANNMDVINMSLGGPNGSTALKNAVDTANNRGVVVVAAAGNSGSTGSTSTVGYPAKYDSTIAVANVNSSNVRNSSSSAGPELDVSAPGTSILSTVPSSGYTSYTGTSMASPHVAGAAALILSKNPNLSNSQVRQRLENTATPLGNSFYYGKGLINAQAAS

SEQ ID NO: 68222 - protein, 274 aa, Bacillus pumilus
AQTVPYGITQIKAPAVHAQGYKGANVKVAVLDTGIHAAHPDLNVAGGASFVPSEPNATQDFQSHGTHVAGTIAALDNTIGVLGVAPSASLYAVKVLDRNGDGQYSWIISGIEWAVANNMDVINMSLGGPNGSTALKNAVDTANNRGVVVVAAAGNSGSTGSTSTVGYPAKYDSTIAVANVNSSNVRNSSSSAGPELDVSAPGTSILSTVPSSGYTCYTGTSMASPHVAGAAALILSKNPNLSNSQVRQRLENTATPLGNSFYYGKGLINAEAAS

SEQ ID NO: 68223 - protein, 274 aa, Bacillus pumilus
AQTVPYGIPQIKAPAVHAQGYKGANVKVAVLDTGIHAAHPDLNVAGGASFVPSEPNATQDFQSHGTHVAGTIAALDNTIGVLGVAPSASLYAVKVLDRNGDGQYSWLLSGIEWAVANNMDVINMSLGGPNGSTALKNAVDTANNRGVVVVAAAGNSGSTGSTSTVGYPAKYDSTIAVANVNSSNVRNSSSSAGPELDVSAPGTSILSTVPSSGYTSYTGTSMASPHVAGAAALILSKNPNLSNSQVRQRLENTATPLGNSFYYGKGLINAEAAS

SEQ ID NO: 68224 - protein, 274 aa, Bacillus pumilus
AQTVPYGITQIKAPAVHAQGYKGANVKVAVLDTGIHAAHPDLNVAGGASFVPSEPNATQDFQSHGTHVAGTIAALDNTIGVLGVAPSASLYAVKVLDRNGDGQYSWIISGIEWAVANNMDVINMSLGGPNGSTALKNAVDTANNRGVVVVAAAGNSGSTGSTSTVGYPAKYDSTIAVANVNSSNVRHSSSSAGPELDVSAPGTSILSTVPSSGYTCYTGTSMASPHVAGAAALILSKNPNLSNSQVRQRLENTATPLGNSFYYGKGLINAEAAS

SEQ ID NO: 68225 - protein, 274 aa, Bacillus pumilus
AQTVPYGITQIKAPAVHAQGYKGANVKVAVLDTGIHAAHPDLNVAGGASFVPSEPNATQDFQSHGTHVAGTIAALDNTIGVLGVAPSASLYAVKVLDRNGDGQYSWIISGIEWAVANNMDVINMSLGGPDGSAALKNAVDTANKRGVVVVAAAGNSGSTGSTSTVGYPAKYDSTIAVANVNSSNVRNSSSSVGPELDVSAPGTSILSTVPSSGYTSYTGTSMASPHVAGAAALILSKNPNLSNSQVRQRLETTATPLGNSFYYGKGLINAEAAS

SEQ ID NO: 68226 - protein, 274 aa, Bacillus pumilus
AQTVPYGIPQIKAPAVHAQGYKGANVKVAVLDTGIHAAHPDLNVAGGASFVPSEPNATQDFQSHGTHVAGTIAALDNTIGVLGVAPSASLYAVKVLDRNGDGQYSWIISGIEWAVANNMDVINMSLGGPNGSTALKNAVDTANNRGVVVVAAAGNSGSTGSTSTVGYPAKYDSTIAVANVNSSNVRNSSSSAGPELDVSAPGTSILSTVPSSGYTCYTGTSMASPHVAGAAALILSKNPNLSNSQVRQRLENTATPLGNSFYYGKGLINAQAAS

SEQ ID NO: 68227 - protein, 274 aa, Bacillus pumilus
AQTVPYGIPQIKAPAVHAQGYKGANVKVAVLDTGIHAAHPDLNVAGGASFVPSEPNATQDFQSHGTHVAGTIAALDNTIGVLGVAPSASLYAVKVLDRNGDGQYSWIISGIEWAVANNMDVINMSLGGPNGSTALKNAVDTANNRGVVVVAAAGNSGSTGSTSTVGYPAKYDSTIAVANVNSSNVRNSSSSAGPELDVSAPGTSILSTVPSSGYTSYTGTSMASPHVAGAAALILSKKPNLSNSQVRQRLENTATPLGNSFYYGKGLINAQAAS

SEQ ID NO: 68228 - protein, 274 aa, Bacillus pumilus
AQTVPYGITQIKAPAVHAQGYKGANVKVAVLDTGIHAAHPDLNVAGGASFVPSEPNATQDFQSHGTHVAGTIAALDNTIGVLGVAPSASLYAVKVLDRNGDGQYSWIISGIEWAVANNMDVINMSLGGPDGSAALKNAVDTANKRGVVVVAAAGNSGSTGSTSTVGYPAKYDSTIAVANVNSSNVRNSSSSAGPELDVSAPGTSVLSTVPSSGYTSYTGTSMASPHVAGAAALILSKNPNLSNSQVRQRLETTATPLGNSFYYGKGLINAEAAS

SEQ ID NO: 68229 - protein, 274 aa, Bacillus pumilus
AQTVPYGITQIKAPAVHAQGYKGANVKVAVLDTGIHAAHPDLNVAGGASFVPSEPNATQDFQSHGTHVAGTIAALDNTIGVLGVAPSASLYAVKVLDRYGDGQYSWIISGIEWAVANNMDVINMSLGGPDGSTALKNAVDTANKRGVVVVAAAGNSGSTGSTSTVGYPAKYDSTIAVANVNSSNVRNSSSSAGPELDVSAPGTSILSTVPSSGYTSYTGTSMASPHVAGAAALILSKNPNLSNSQVRQRLETTATPLGNSFYYGKGLINAEAAS

SEQ ID NO: 68230 - protein, 274 aa, Bacillus pumilus
AQTVPYGIPQIKAPAVHAQGYKGANVKVAVLDTGIHAAHPDLNVAGGASFVPSEPNATQDYQSHGTHVAGTIAALDNTIGVLGVAPSASLYSVKVLDRNGDGQYSWIISGIEWAVANNMDVINMSLGGPDGSTALKNAVDTANKRGVVVVAAAGNSGSTGSTSTVGYPAKYDSTIAVANVNSSNVRNSSSSAGPELDVSAPGTSILSTVPSSGYTSYTGTSMASPHVAGAAALILSKNPNLSNSQVRQRLETTATPLGNSFYYGKGLINAEAAS

SEQ ID NO: 68231 - protein, 274 aa, Bacillus pumilus
AQTVPYGIPQIKAPAVHAQGYKGANVKVAVLDTGIHAAHPDLNVAGGASFVPSEPNATQDFQSHGTHVAGTIAALDNTIGVLGVAPSASLYAVKVLDRNGDGQYSWIISGIEWAVANNMDVINMSLGGPDGSTALKNAVDTANKRGVVVVAAAGNSGSTGSSSTVGYPAKYDSTIAVANVNSSNVRNSSSSAGPELDVSAPGTSILSTVPSSGYTSYTGTSMASPHVAGAAALILSKNPNLSNSQVRQRLETTATPLGNSFYYGKGLINAEAAS

SEQ ID NO: 68232 - protein, 274 aa, Brevibacillus parabrevis
AQTVPYGIPQIKAPAVHAQGYKGANVKVAVLDTGIHAAHPDLNVAGGASFVPSEPNATQDFQSHGTHVAGTIAALDNTIGVLGVAPSASLYAVKVLDRYGDGQYSWIISGIEWAVANNMDVINMSLGGPSGSTALKNTVDTANNRGVVVVAAAGNSGSSGSSSTVGYPAKYDSTIAVANVNSNNVRNSSSSAGPELDVSAPGTSILSTVPSSGYTSYTGTSMASPHVAGAAALILCKNPNLTNSQVRQRLENTATPLGDSFYYGKGLINVQAAS

SEQ ID NO: 68233 - protein, 274 aa, Bacillus pumilus
AQTVPYGITQIKAPAVHAQGYKGANVKVGVLDTGIHAAHPDLNVAGGASFVPSEPNATQDFQSHGTHVAGTIAALDNTIGVLGVAPSASLYAVKVLDRNGEGQYSWIISGIEWAVANNMDVINMSLGGPSGSTALKNAVDTANNRGVVVVAAAGNSGSTGSTSTVGYPAKYDSTIAVANVNSSNVRNSSSSAGPELDVSAPGTSILSTVPSSGYTCYTGTSMATPHVAGAAALILSKNPNLSNSQVRQRLESTATPLGNSFYYGKGLINAEAAS

SEQ ID NO: 68234 - protein, 274 aa, Bacillus pumilus
AQTVPYGITQIKAPAVHAQGYKGANVKVAVLDTGIHAAHPDLNVAGGASFVPSEPNATQDFQSHGTHVAGTIAALDNTIGVLGVAPSASLYAVKVLDRNGDGQYSWLLSGIEWAVANNMDVINMSLGGPNGSTALKNAVDTANNRGVVVVAAAGNSGSTGSTSTVGYPAKYDSTIAVANVNSSNVRNSSSSAGPELDVSAPGTSILSTVPSSGYACYTGTSMASPHVAGAAALILSKNPNLSNSQVRQRLENTATPLGNSFYYGKGLINAEAAS

SEQ ID NO: 68235 - protein, 274 aa, Bacillus pumilus
AQTVPYGIPQIKAPAVHAQGYKGANVKVAVLDTGIHAAHPDLNVAGGASFVPSEPNATQDFQSHGTHVAGTIAALDNTIGVLGVAPSASLYAVKVLDRNGDGQYSWIISGIEWAVANNMDVINMSLGGPNGSTALKNAVDTANNRGVVVVAAAGNSGSTGSTSTVGYPAKYDSTIAVANVNSSNVRHSSSSAGPELDVSAPGTSILSTVPSSGYTSYTGTSMASPHVAGAAALILSKNPNLSNSQVRQRLENTATPLGNSFYYGKGLINAQAAS

SEQ ID NO: 68236 - protein, 274 aa, Bacillus pumilus
AQTVPYGIPQIKAPAVHAQGYKGANVKVAVLDTGIHAAHPDLNVAGGASFVPSEPNATQDFQSHGTHVAGTIAALDNTIGVLGVAPSASLYAVKVLDRNGDGQYSWLLSGIEWAVANNMDVINMSLGGPNGSTALKNAVDTANNRGVVVVAAAGNSGSTGSTSTVGYPAKYDSTIAVANVNSSNVRNSSSSAGPELDVSAPGTSILSTVPSSGYASYTGTSMASPHVAGAAALILSKNPNLSNSQVRQRLENTATPLGNSFYYGKGLINAQAAS

SEQ ID NO: 68237 - protein, 274 aa, Bacillus pumilus
AQTVPYGIPEIKAPAVHAQGYKGANVKVAVLDTGIHAAHPDLNVAGGASFVPSEPNATQDFQSHGTHVAGTIAALDNTIGVLGVAPSASLYAVKVLDRNGDGQYSWIISGIEWAVANNMDVINMSLGGPNGSTALKNAVDTANNRGVVVVAAAGNSGSTGSTSTVGYPAKYDSTIAVANVNSSNVRNSSSSAGPELDVSAPGTSILSTVPSSGYTSYTGTSMASPHVAGAAALILSKNPNLSNSQVRQRLENTATPLGNSFYYGKGLINAQAAS

SEQ ID NO: 68238 - protein, 274 aa, Bacillus pumilus
AQTVPYGIPQIKAPAVHAQGYKGANVKVAVLDTGIHAAHPDLNVAGGASFVPSEPNATQDFQSHGTHVAGTIAALDNTIGVLGVAPSASLYAVKVLDRNGEGQYSWIISGIEWAVANNMDVINMSLGGPNGSTALKNAVDTANNRGVVVVAAAGNSGSTGSTSTVGYPAKYDSTIAVANVNSSNVRNSSSSAGPELDVSAPGTSILSTVPSSGYTSYTGTSMASPHVAGAAALILSKNPNLSNSQVRQRLENTATPLGNSFYYGKGLINAQAAS

SEQ ID NO: 68239 - protein, 274 aa, Bacillus pumilus
AQTVPYGIPQIKAPAVHAQGYKGANVKVAVLDTGIHAAHPDLNVAGGASFVPSEPNATQDFESHGTHVAGTIAALDNTIGVLGVAPSASLYAVKVLDRNGEGQYSWIISGIEWAVANNMDVINMSLGGPDGSTALKNAVDTANNRGVVVVAAAGNSGSTGSTSTVSYPAKYDSTIAVANVNSSNVRNSSSSAGPELDVSAPGTSILSTVPSSGYTSYTGTSMASPHVAGAAALILSKNPNLSNSQVRQRLENTATPLGNSFYYGKGLINAEAAS

SEQ ID NO: 68240 - protein, 274 aa, Bacillus pumilus
AQTVPYGITQIKAPAVHAQGYKGANVKVAVLDTGIHAAHPDLNVAGGASFVPSEPNATQDFQSHGTHVAGTIAALDNTIGVLGVAPSASLYAVKVLDRNGDGQYSWIISGIEWAVANNMDVINMSLGGPNGSTALKNAVDTANKRGVVVVAAAGNSGSTGSTSTVGYPAKYDSTIAVANVNSSNVRNSSSSAGPELDVSAPGTSILSTVPSSGYTSMTGTSMASPHVAGAAALILSKNPNLSNSQVRQRLETTATPLGNSFYYGKGLINAEAAS

SEQ ID NO: 68241 - protein, 273 aa, Bacillus pumilus
AQTVPYGITQIKAPAVHAQGYKGANVKVAVLDTGIHAAHPDLNVAGGASFVPSEPNATQDFQSHGTHVAGTIAALDNTIGVLGVAPSASLYAVKVLDRNGDGQYSWIISGIEWAVANNMDVINMSLGGPDGSAALKNAVDTANKRGVVVVAAAGNSGSTGSTSTVGYPAKYDSTIAVANVNSSNVRNSSSSAGPELDVSAPGTSILSTVPSSGYTSYTGTSMASPHVAGAAALILSKNPNLSNSQVRQRLETTATPLGNSFYYGKGLINAEAA

SEQ ID NO: 68242 - protein, 356 aa, Unidentified
AEEKVKYLIGFEEEAELEAFTEEIDQVGVFSVEEQSVAEDTLDIDVDIIDEYDYIDVLAVELDPEDVDALSEEAGISFIEEDIELSIQQTVPWGITRVQAPAVHNRGITGSGVRVAILDSGISAHSDLNIRGGASFVPGEPTTADLNGHGTHVAGTVAALNNSIGVIGVAPNADLYAVKVLGANGSGSVSGIAQGLEWAATNNMHIANMSLGSDFPSSTLERAVNYATSRDVLVIAATGNNGSGSVGYPARYANAMAVGATDQNNRRANFSQYGTGIDIVAPGVNVQSTYPGNRYVSMNGTSMATPHVAGAAALVKQRYPSWNATQIRNHLKNTATNLGNSSQFGSGLVNAEAATR

SEQ ID NO: 68243 - protein, 356 aa, Unidentified
AEEKVKYLIGFEEEAELEAFTEEIDQVGVFSVEEQSVAEDTLDIDVDIIDEYDYIDVLAVELDPEDVDALSEEAGISFIEEDIELSIQQTVPWGITRVQAPAVHNRGVTGSGVRVAILDSGISTHSDLTIRGGASFVPGEPTTADLNGHGTHVAGTVAALNNSIGVIGVAPSADLYAVKVLGANGRGSVSGIAQGLEWAAANNMHIANMSLGSDAPSTTLERAVNYATSQGVLVIAATGNNGSGSVGYPARYANAMAVGATDQNNRRANFSQYGTGIDIVAPGVNVQSTYPGNRYVSMNGTSMATPHVAGAAALVKQRYPSWNATQIRNHLKNTATNLGNSSQFGSGLVNAEAATR

SEQ ID NO: 68244 - protein, 356 aa, Unidentified
AEEKVKYLIGFEEEAELEAFTEEIDQVGVFSVEEQSVAEDTLDIDVDIIDEYDYIDVLAVELDPEDVDALSEEAGISFIEEDIELSIQQTVPWGITRVQAPAVHNRGVTGSGVRVAILDSGISTHSDLTIRGGASFVPGEPTTADLNGHGTHVAGTVAALNNSIGVIGVAPSADLYAVKVLGANGRGSVSGIAQGLEWAAANNMHIANMSLGSDAPSTTLERAVNYATSQGVLVIAATGNNGSGSVGYPARYANAMAVGATDQNNRRANFSQYGSGIDIVAPGVNVQSTYPGNRYVSMNGTSMATPHVAGAAALVKQRYPSWNATQIRNHLKNTATNLGNSSQFGSGLVNAEAATR

SEQ ID NO: 68245 - protein, 275 aa, Unidentified
AQTVPWGIPHIKADKAHAAGVTGSGVKVAILDTGIDANHADLNVKGGASFVSGEPNALQDGNGHGTHVAGTVAALNNTTGVLGVAYNADLYAVKVLSASGSGTLSGIAQGIEWSVANGMDVINMSLGGSSGSSALQQACDNAYARGVVVIAAAGNSGSRGKQNTMGYPARYSSVIAVGAVDSSNNRASFSSVGNELEVMAPGVNILSTTPGNNYASFNGTSMASPHVAGAAALIKAKYPSMTNVQIRERLKNTATNLGDPFFYGKGVINVESALQ

SEQ ID NO: 68246 - protein, 275 aa, Bacillus subtilis
AQTTPWGIEHINAHKAHSSSVTGSGVKVAVLDTGIDASHPDLNVKGGASFISGEPNALVDTNGHGTHVSGTVAALDNTIGVVGVAYNADLYAVKVLSASGSGTLSGIAQGVEWAIANNMDVINMSLGGSSGSTALKQAVDNAYASGIVVVAAAGNSGTRGRQNTMGYPARYSSVIAVGAVDSNNNRASFSSVGAELEVMAPGVSVLSTVPGGGYASYNGTSMASPHVAGAAALIKAKYPSLSASQIRDRLRNTATYLGDPFYYGNGVINVERALQ

SEQ ID NO: 68247 - protein, 275 aa, Bacillus subtilis
AQTTPWGITHINAHKAHSSSVTGSGVKVAVLDTGIDASHPDLNVKGGASFISGEPNALVDTNGHGTHVAGTVAALDNTIGVVGVAYNADLYAVKVLSASGSGTLSGIAQGVEWAIANNMDVINMSLGGSSGSTALKQAVDNAYASGIVVVAAAGNSGTRGRQNTMQYPARYSSVIAVGAVDSNNNRASFSSVGAELEVMAPGVSVLSTVPGGGYASYNGTSMASPHVAGAAALIKAKYPSLSASQIRDRLRNTATYLGDPFYYGNGVINVERALQ

SEQ ID NO: 68248 - protein, 275 aa, Bacillus subtilis
AQTTPWGITHINAHKAHSSSVTGSGVKVAVLDTGIDASHPDLNVKGGASFISGEPNALVDTNGHGTHVAGTVAALDNTIGVVGVAYNADLYAVKVLSASGSGTLSGIAQGVEWAIANNMDVINMSLGGSSGSTALKQAVDNAYASGIVVVAAAGNSGTRGRQNTMGYPARYSSVIAVGAVDSNNNRASFSSVGAELEVMAPGVSVLSTVPGGGYASYSGTSMASPHVAGAAALIKAKYPSLSASQIRDRLRNTATYLGPPFYYGNGVINVERALQ

SEQ ID NO: 68249 - protein, 276 aa, Bacillus sp. m3-13
AQTVPYGVPHIKADVAHAQGVTGSGVKVAVLDTGIDASHEDLNVVGGASFVSEEPDALTDGNGHGTHVAGTIAAVNNNTGVLGVAYDVDLYAVKVLSAGGSGTLAGIAQGIEWAIDNDMDVINMSLGGSTGSSTLKQASDNAYNSGIVVVAAAGNSGSFFGLINTIGYPARYDSVIAVGAVDSNNNRASFSSVGSQLEVLAPGVSINSTLPGNQYGELNGTSMASPHVAGAAALLLAQNPNLTNVEVRERLRSTATNLGSSFNYGYGVINLEAALQ

SEQ ID NO: 68250 - protein, 275 aa, Bacillus subtilis
AQTTPWGITHINAHKAHSSSVTGSGVKVAVLDTGIDASHPDLNVKGGASFISGEPNALVDTNGHGTHVSGTVAALDNTIGVVGVAYNADLYAVKVLSASGSGTLSGIAQGVEWAIANNMDVINMSLGGSSGSTALKQAVDNAYASGIVVVAAAGNSGTRGRQNTMGYPARYSSVIAVGAVDSNNNRASFSSVGAELEVMAPGVSVLSTVPGGGYASYNGTSMASPHVAGAAALIKAKYPSLSASQIRDRLRNTATYLGDPFYYGNGVINVERALQ

SEQ ID NO: 68251 - protein, 275 aa, Bacillus subtilis
AQTTPWGIEHINAHKAHSSSVTGSGVKVAVLDTGIDASHEDLNVKGGASFISGEPNALVDTNGHGTHVAGTVAALDNTIGVVGVAYNADLYAVKVLSASGSGTLSGIAQGVEWAIANNMDVINMSLGGSSGSTALKQAVDNAYASGIVVVAAAGNSGTRGRQNTMGYPARYSSVIAVGAVDSNNNRASFSSVGAELEVMAPGVSVLSTVPGGGYASYNGTSMASPHVAGAAALIKAKYPSLSASQIRDRLRNTATYLGDPFYYGNGVINVERALQ

SEQ ID NO: 68252 - protein, 275 aa, Unidentified
AQTVPWGIPHIKADKAHAAGVTGSGVKVAILDTGIDANHADLNVKGGASFVSGEPNALQDGNGHGTHVAGTVAALNNTTGVLGVAYNADLYAVKVLNASGSGTLSGIAQGIEWSIANGMDVINMSLGGSTGSTALQQASNNAYNRGIVVIAAAGNSGSLGNRNTIGYPARYSSVIAVGAVDSNNNRASFSSVGSELEVMAPGVNILSTTPGNNYASFNGTSMAAPHVAGAAALIKAKYPNMTNVQIRDRLRNTATNLGDPFFYGRGVINVESALQ

SEQ ID NO: 68253 - protein, 275 aa, Bacillus subtilis
AQTTPWGIEHINAHKAHSSSVTGSGVKVAVLDTGIDASHPDLNVKGGASFISGEPNALVDTNGHGTHVAGTVAALDNTIGVVGVAYNADLYAVKVLSASGSGTLSGIAQGVEWAIANNMDVINMSLGGSSGSTALKQAVDNAYASGIVVVAAAGNSGTRGRQNTMGYPARYSSVIAVGAVDSNNQRASFSSVGAELEVMAPGVSVLSTVPGGGYASYNGTSMASPHVAGAAALIKAKYPSLSASQIRDRLRNTATYLGDPFYYGNGVINVERALQ

SEQ ID NO: 68254 - protein, 275 aa, Bacillus subtilis
AQTTPWGIEHINAHKAHSSSVTGSGVKVAVLDTGIDASHPDLNVKGGASFISGEPNALVDTNGHGTHVAGTVAALDNNIGVVGVAYNADLYAVKVLSASGSGTLSGIAQGVEWAIANNMDVINMSLGGSSGSTALKQAVDNAYASGIVVVAAAGNSGTRGRQNTMGYPARYSSVIAVGAVDSNNNRASFSSVGAELEVMAPGVSVLSTVPGGGYASYNGTSMASPHVAGAAALIKAKYPSLSASQIRDRLRNTATYLGDPFYYGNGVINVERALQ

SEQ ID NO: 68255 - protein, 275 aa, Bacillus subtilis
AQTTPWGITHINAHKAHSSSVTGSGVKVAVLDTGIDASHPDLNVKGGASFISGEPNALVDTNGHGTHVAGTVAALDNTIGVVGVAYNADLYAVKVLSASGSGTLSGIAQGVEWAIANNMDVINMSLGGSSGSTALKQAVDNAYASGIVVVAAAGNSGTRGRQNTMGYPARYSSVIAVGAVDSNNQRASFSSVGAELEVMAPGVSVLSTVPGGGYASYNGTSMASPHVAGAAALIKAKYPSLSASQIRDRLRNTATYLGDPFYYGNGVINVERALQ

SEQ ID NO: 68256 - protein, 275 aa, Bacillus subtilis
AQTTPWGITHINAHKAHSSSVTGSGVKVAVLDTGIDASHPDLNVKGGASFISGEPNALVDTNGHGTHVAGTVAALDNTIGVVGVAYNADLYAVKVLSASGSGTLSGIAQGVEWAIANNMDVINMSLGSSSGSTALKQAVDNAYASGIVVVAAAGNSGTRGRQNTMGYPARYSSVIAVGAVDSNNNRASFSSVGAELEVMAPGVSVLSTVPGGGYASYNGTSMASPHVAGAAALIKAKYPSLSASQIRDRLRNTATYLGDPFYYGNGVINVERALQ

SEQ ID NO: 68257 - protein, 275 aa, Bacillus subtilis
AQTTPWGITHINAHKAHSSSVTGSGVKVAVLDTGIDASHPDLNVKGGASFISGEPNALVDTNGHGTHVAGTVAALDNTIGVVGVAYNADLYAVKVLSASGSGTLSGIAQGVEWAIANNMDVINMSLGGSSGSTALKQAVDNAYASGIVVVAAAGNSGTRGRQNTMQYPARYSSVIAVGAVDSNNNRASFSSVGAELEVMAPGVSVLSTVPGGGYASYNGTSMASPHVAGAAALIKAKYPSLSASQIRDRLRNTATYLGPPFYYGNGVINVERALQ

SEQ ID NO: 68258 - protein, 275 aa, Bacillus subtilis
AQTTPWGITHINAHKAHSSSVTGSGVKVAVLDTGIDASHPDLNVKGGASFISGEPNALVDTNGHGTHVAGTVAALDNNIGVVGVAYNADLYAVKVLSASGSGTLSGIAQGVEWAIANNMDVINMSLGGSSGSTALKQAVDNAYASGIVVVAAAGNSGTRGRQNTMGYPARYSSVIAVGAVDSNNNRASFSSVGAELEVMAPGVSVLSTVPGGGYASYNGTSMASPHVAGAAALIKAKYPSLSASQIRDRLRNTATYLGPPFYYGNGVINVERALQ

SEQ ID NO: 68259 - protein, 275 aa, Bacillus subtilis
AQVTPWGITHINAHKAHSSSVTGSGVKVAVLDTGIDASHPDLNVKGGASFISGEPNALVDTNGHGTHVAGTVAALDNTIGVVGVAYNADLYAVKVLSASGSGTLSGIAQGVEWAIANNMDVINMSLGGSSGSTALKQAVDNAYASGIVVVAAAGNSGTRGRQNTMGYPARYSSVIAVGAVDSNNNRASFSSVGAELEVMAPGVSVLSTVPGGGYASYNGTSMASPHVAGAAALIKAKYPSLSASQIRDRLRNTATYLGPPFYYGNGVINVERALQ

SEQ ID NO: 68260 - protein, 275 aa, Bacillus subtilis
AQTTPWGIEHINAHKAHSSSVTGSGVKVAVLDTGIDASHPDLNVKGGASFISGEPNALVDTNGHGTHVAGTVAALNNTIGVVGVAYNADLYAVKVLSASGSGTLSGIAQGVEWAIANNMDVINMSLGGSSGSTALKQAVDNAYASGIVVVAAAGNSGTRGRQNTMGYPARYSSVIAVGAVDSNNNRASFSSVGAELEVMAPGVSVLSTVPGGGYASYNGTSMASPHVAGAAALIKAKYPSLSASQIRDRLRNTATYLGPPFYYGNGVINVERALQ

SEQ ID NO: 68261 - protein, 275 aa, Bacillus subtilis
AQTTPWGITHINAHKAHSSSVTGSGVKVAVLDTGIDASHPDLNVKGGASFISGEPNALVDTNGHGTHVAGTVAALDNNIGVVGVAYNADLYAVKVLSASGSGTLSGIAQGVEWAIANNMDVINMSLGGSSGSTALKQAVDNAYASGIVVVAAAGNSGTRGRQNTMGYPARYSSVIAVGAVDSNNNRASFSSVGAELEVMAPGVSVLSTVPGGGYASYNGTSMASPHVAGAAALIKAKYPSLSASQIRDRLRNTATYLGDPFYYGNGVINVERALQ

SEQ ID NO: 68262 - protein, 275 aa, Bacillus subtilis
AQTTPWGIEHINAHKAHSSSVTGSGVKVAVLDTGIDASHPDLNVKGGASFISGEPNALVDTNGHGTHVAGTVAALDNTIGVVGVAYNADLYAVKVLSASGSGTLSGIAQGVEWAIANNMDVINMSLGGSSGSTALKQAVDNAYASGIVVVAAAGNSGTRGRQNTMQYPARYSSVIAVGAVDSNNNRASFSSVGAELEVMAPGVSVLSTVPGGGYASYNGTSMASPHVAGAAALIKAKYPSLSASQIRDRLRNTATYLGDPFYYGNGVINVERALQ

SEQ ID NO: 68263 - protein, 275 aa, Bacillus subtilis
AQTTPWGITHINAHKAHSSSVTGSGVKVAVLDTGIDASHPDLNVKGGASFISGEPNALVDTNGHGTHVAGTVAALDNTIGVVGVAYNADLYAVKVLSASGSGTLSGIAQGVEWAIANNMDVINMSLGGSSGSTALKQAVDNAYASGIVVVAAAGNSGTRGRQNTMGYPARYSSVIAVGAVDSNNNRASFSSVGAELEVMAPGVSVLSTVPGGGYASYSGTSMASPHVAGAAALIKAKYPSLSASQIRDRLRNTATYLGDPFYYGNGVINVERALQ

SEQ ID NO: 68264 - protein, 275 aa, Bacillus subtilis
AQTTPWGITHINAHKAHSSSVTGSGVKVAVLDTGIDASHPDLNVKGGASFISGEPNALVDTNGHGTHVAGTVAALNNTIGVVGVAYNADLYAVKVLSASGSGTLSGIAQGVEWAIANRMDVINMSLGGSSGSTALKQAVDNAYASGIVVVAAAGNSGTRGRQNTMGYPARYSSVIAVGAVDSNNNRASFSSVGAELEVMAPGVSVLSTVPGGGYASYNGTSMASPHVAGAAALIKAKYPSLSASQIRDRLRNTATYLGDPFYYGNGVINVERALQ

SEQ ID NO: 68265 - protein, 275 aa, Bacillus subtilis
AQTTPWGIEHINAHKAHSSSVTGSGVKVAVLDTGIDASHPDLNVKGGASFISGEPNALVDTNGHGTHVAGTVAALDNTIGVVGVAYNADLYAVKVLSASGSGTLSGIAQGVEWAIANNMDVINMSLGGSSGSTALKQAVDNAYASGIVVVAAAGNSGTRGRQNTMGYPARYSSVIAVGAVDSNNNRASFSSVGAELEVMAPGVSVLSTVPGGGYASYSGTSMASPHVAGAAALIKAKYPSLSASQIRDRLRNTATYLGDPFYYGNGVINVERALQ

SEQ ID NO: 68266 - protein, 275 aa, Bacillus subtilis
AQVTPWGITHINAHKAHSSSVTGSGVKVAVLDTGIDASHPDLNVKGGASFISGEPNALVDTNGHGTHVAGTVAALDNTIGVVGVAYNADLYAVKVLSASGSGTLSGIAQGVEWAIANNMDVINMSLGGSSGSTALKQAVDNAYASGIVVVAAAGNSGTRGRQNTMGYPARYSSVIAVGAVDSNNNRASFSSVGAELEVMAPGVSVLSTVPGGGYASYNGTSMASPHVAGAAALIKAKYPSLSASQIRDRLRNTATYLGDPFYYGNGVINVERALQ

SEQ ID NO: 68267 - protein, 275 aa, Bacillus subtilis
AQTTPWGITHINAHKAHSSSVTGSGVKVAVLDTGIDASHPDLNVKGGASFISGEPNALVDTNGHGTHVSGTVAALDNTIGVVGVAYNADLYAVKVLSASGSGTLSGIAQGVEWAIANNMDVINMSLGGSSGSTALKQAVDNAYASGIVVVAAAGNSGTRGRQNTMGYPARYSSVIAVGAVDSNNNRASFSSVGAELEVMAPGVSVLSTVPGGGYASYNGTSMASPHVAGAAALIKAKYPSLSASQIRDRLRNTATYLGPPFYYGNGVINVERALQ

SEQ ID NO: 68268 - protein, 275 aa, Bacillus subtilis
AQTTPWGITHINAHKAHSSSVTGSGVKVAVLDTGIDASHPDLNVKGGASFISGEPNALVDTNGHGTHVAGTVAALDNTIGVVGVAYNADLYAVKVLSASGSGTLSGIAQGVEWAIANNMDVINISLGGSSGSTALKQAVDNAYASGIVVVAAAGNSGTRGRQNTMGYPARYSSVIAVGAVDSNNNRASFSSVGAELEVMAPGVSVLSTVPGGGYASYNGTSMASPHVAGAAALIKAKYPSLSASQIRDRLRNTATYLGDPFYYGNGVINVERALQ

SEQ ID NO: 68269 - protein, 275 aa, Bacillus subtilis
AQTTPWGITHINAHKAHSSSVTGSGVKVAVLDTGIDASHPDLNVKGGASFISGEPNALVDTNGHGTHVAGTVAALNNTIGVVGVAYNADLYAVKVLSASGSGTLSGIAQGVEWAIANNMDVINMSLGGPSGSTALKQAVDNAYASGIVVVAAAGNSGTRGRQNTMGYPARYSSVIAVGAVDSNNNRASFSSVGAELEVMAPGVSVLSTVPGGGYASYNGTSMASPHVAGAAALIKAKYPSLSASQIRDRLRNTATYLGDPFYYGNGVINVERALQ

SEQ ID NO: 68270 - protein, 275 aa, Bacillus sp.
AQTTPWGITHINAHKAHSSSVTGSGVKVAVLDTGIDASHPDLNVKGGASFISGEPNALVDTNGHGTHVAGTVAALNNTIGVVGVAYNADLYAVKVLSASGSGTLSGIAQGVEWAIANNMDVINMSLGGSSGSTALKQAVDNAYASGIVVVAAAGNSGTRGRQNTMGYPARYSSVIAVGAVDSNNNRASFSSVGAELEVMAPGVSVLSTVPGGGYASYNGTSMASPHVAGAAALIKAKYPSLSASQIRDRLRNTATYLGDPFYYGNGVINVERALQ

SEQ ID NO: 68271 - protein, 275 aa, Bacillus subtilis
AQTTPWGITHINAHKAHSSSVTGSGVKVAVLDTGIDASHPDLNVKGGASFISGEPNALVDTNGHGTHVAGTVAALNNTIGVVGVAYDADLYAVKVLSASGSGTLSGIAQGVEWAIANNMDVINMSLGGSSGSTALKQAVDNAYASGIVVVAAAGNSGTRGRQNTMGYPARYSSVIAVGAVDSNNNRASFSSVGAELEVMAPGVSVLSTVPGGGYASYNGTSMASPHVAGAAALIKAKYPSLSASQIRDRLRNTATYLGDPFYYGNGVINVERALQ

SEQ ID NO: 68272 - protein, 254 aa, Bacillus sp.
AQTVPYGIIKAPVHAQGYTGSNVKVAVLDTGIASHPDLNVGGASFVPSEPQDGNGHGTHVAGTVAALNNTIGVLGVAPSASLYAVKVLASGSGSYSIIQGIEWAINNMDVINMSLGGPSGSTALKQAVDAASGVVVVAAAGNSGSSGTTVGYPAKYSVIAVGAVDSNNNRASFSSGSELDVMAPGVSIQSTLPGNYASYNGTSMASPHVAGAAALILSKHPSWSNSQVRNRLNTATLGSFYYGKGLINVEAAAQ

SEQ ID NO: 68273 - protein, 274 aa, Bacillus pumilus
AQTVPYGIPQIKAPAVHAQGYKGANVKVAVLDTGIHAAHPDLNVAGGASFVPSEPNATQDFQSHGTHVAGTIAALDNTIGVLGVAPSASLYAVKVLDRNGDGQYSWIISGIEWAVANNMDVINMSLGGPNHSTALKNAVDTANNRGVVVVAAAGNSGSTGSTSTVGYPAKYDSTIAVANVNSSNVRNSSSSAGPELDVSAPGTSILSTVPNSGYTSYTGTSMASPHVAGAAALILSKNPNLSNSQVRQRLENTATPLGNSFYYGKGLINAQAAS

SEQ ID NO: 68274 - protein, 274 aa, Bacillus pumilus
AQTVPYGIPQIKAPAVHAQGYKGANVKVAVLDTGIHAAHPDLNVAGGASFVPSEPNATQDFQSHGTHVAGTIAALDNTIGVLGVAPSASLYAVKVLDRNGDGQYSWIISGIEWAVANNMDVINMSLGGPNGSTALKNAVDTANNRGVVVVAAAGNSGSTGSTSTVSYPAKYDSTIAVANVNSSNVRNSSSSAGPELDVSAPGTSILSTVPSSGYTSYTGTSMASPHVAGAAALILSKNPNLSNSQVRQRLENTATPLGNSFYYGKGLINAQAAS

SEQ ID NO: 68275 - protein, 274 aa, Bacillus pumilus
AQTVPYGITQIKAPAVHAQGYKGANVKVAVLDTGIHAAHPDLNVAGGASFVPSEPNATQDFQSHGTHVAGTIAALDNTIGVLGVAPSASLYAVKVLDRNGDGQYSWIISGIEWAVANNMDVINMSLGGPDGSTALKNAVDTANKRGVVVVAAAGNGGSTGSTSTVGYPAKYDSTIAVANVNSSNVRNSSSSAGPELDVSAPGTSILSTVPSSGYTSYTGTSMASPHVAGAAALILSKNPNLSNSQVRQRLETTATPLGNSFYYGKGLINAEAAS

SEQ ID NO: 68276 - protein, 274 aa, Bacillus pumilus
AQTVPYGITQIKAPAVHAQGYKGANVKVAVLDTGIHAAHPDLNVAGGASFVPSEPNATQDFQSHGTHVAGTIAALDNTIGVLGVAPSASLYAVKVLDRNGDGQYSWIISGIEWAVANNMDVINMSLGGPDGSAALKNAVDTANKRGVVVVAAAGNSGSTGSTSTVGYPAKYDSTIAVANVNSSNVRNSTSSAGPELDVSAPGTSILSTVPSSGYTSYTGTSMASPHVAGAAALILSKNPNLSNSQVRQRLETTATPLGNSFYYGKGLINAEAAS

SEQ ID NO: 68277 - protein, 275 aa, Bacillus sp. LG1
AQTVPWGIPHIKADKAHAAGVTGSGVKVAILDTGIDANHADLNVKGGASFVSGEYNALQDGNGHGTHVAGTVAALNNTTGVLGVAYNADLYAVKVLSASGSGTLSGIAQGIEWSISNGMNVINMSLGGSSGSTALQQACNNAYNRGIVVIAAAGNSGSSGNRNTMGYPARYSSVIAVGAVSSNNTRASFSSVGSELEVMAPGVNILSTTPGNNYASFNGTSMAAPHVAGAAALIKAKYPSMTNVQIRERLKNTATNLGDPFFYGKGVINVESALQ

SEQ ID NO: 68278 - protein, 274 aa, Bacillus pumilus
AQTVPYGIPQIKAPAVHAQGYKGANVKVAVLDTGIHAAHPDLNVAGGASFVPSEPNATQDFQSHGTHVAGTIAALDNTIGVLGVAPSASLYAVKVLDRNGDGQYSWIISGIEWAVANNMDVINMSLGGPNGSTALKNAVDTANNRGVVVVAAAGNSGSTGSTSTVMYPAKYDSTIAVANVNSSNVRNSSSSAGPELDVSAPGTSILSTVPNSGYTSYTGTSMASPHVAGAAALILSKNPNLSNSQVRQRLENTATPLGNSFYYGKGLINAQAAS

SEQ ID NO: 68279 - protein, 274 aa, Bacillus pumilus
AQTVPYGIPQIKAPAVHAQGYKGANVKVAVLDTGIHAAHPDLNVAGGASFVPSEPNATQDFQSHGTHVAGTIAALDNTIGVLGVAPSASLYAVKVLDRNGDGQYSWIISGIEWAVANNMDVINMSLGGPDGSTALKNAVDKANNRGVVVVAAAGNSGSTGSTSTVGYPAKYDSTIAVANVNSSNVRNSSSSAGPELDVSAPGTSILSTVPSSGYTSYTGTSMASPHVAGAAALILSKNPNLSNSQVRQRLENSATPLGNSFYYGKGLINAQAAS

SEQ ID NO: 68280 - protein, 274 aa, Bacillus pumilus
AQTVPYGIPQIKAPAVHAQGYKGANVKVAVLDTGIHAAHPDLNVAGGASFVPSEPNATQDFQSHGTHVAGTIAALDNTIGVLGVAPSASLYAVKVLDRNGDGQYSWLLSGIEWAVANNMDVINMSLGGPNGSTALKNAVDTANNRGVVVVAAAGNSGSTGSTSTVGYPAKYDSTIAVANVNSSNVRNSSSSAGPELDVSAPGTSILSTVPSSGYTSYTGTSMASPHVAGAAALILSKNPNLSNSQVRQRLETTATPLGNSFYYGKGLINAQAAS

SEQ ID NO: 68281 - protein, 274 aa, Bacillus pumilus
AQTVPYGISQIKAPAVHAQGYKGANVKVAVLDTGIHAAHPDLNVAGGASFVPSEPNATQDFQSHGTHVAGTIAALDNTIGVLGVAPSASLYAVKVLDRNGDGQYSWIISGIEWAVANNMDVINMSLGGPNGSTALKNAVDTANNRGVVVVAAAGNSGSTGSTSTVGYPAKYDSTIAVANVNSSNVRNSSSSAGPELDVSAPGTSILSTVPSSGYTSYTGTSMASPHVAGAAALILSKNPNLSNSQVRQRLENTATPLGNSFYYGKGLINAQAAS

SEQ ID NO: 68282 - protein, 274 aa, Bacillus pumilus
AQTVPYGISQIKAPAVHAQGYKGANVKVAVLDTGIHAAHPDLNVAGGASFVPSEPNATQDFQSHGTHVAGTIAALDNTIGVLGVAPSASLYAVKVLDRNGDGQYSWIISGIEWAVANNMDVINMSLGGPNGSTALKNAVDTANNRGVVVVAAAGNSGSTGSTSTVGYPAKYDSTIAVANVNSSNVRNSSSSAGPELDVSAPGTSILSTVPSSGYTSYTGTSMASPHVAGAAALILSKKPNLSNSQVRQRLENTATPLGNSFYYGKGLINAQAAS

SEQ ID NO: 68283 - protein, 274 aa, Bacillus pumilus
AQTVPYGITQIKAPAVHAQGYKGANVKVAVLDTGIHAAHPDLNVAGGASFVPSEPNATQDFQSHGTHVAGTIAALDNTIGVLGVAPSASLYAVKVLDRNGDGQYSWIISGIEWAVANNMDVINMSLGGPNGSTALKNAVDTANNRGVVVVAAAGNSGSTGSTSTVSYPAKYDSTIAVANVNSSNVRNSSSSAGPELDVSAPGTSILSTVPSSGYTCYTGTSMASPHVAGAAALILSKNPNLSNSQVRQRLENTATPLGNSFYYGKGLINAEAAS

SEQ ID NO: 68284 - protein, 274 aa, Bacillus pumilus
AQTVPYGIPQIKAPAVHAQGYKGANVKVAVLDTGIHAAHPDLNVAGGASFVPSEPNATQDFESHGTHVAGTIAALDNTIGVFGVAPSASLYAVKVLDRNGDGQYSWIISGIEWAVANNMDVINMSLGGPNGSTALKNAVDTANNRGVVVVAAAGNSGSTGSTSTVGYPAKYDSTIAVANVNSSNVRHSSSSAGPELDVSAPGTSILSTVPSSGYTSYTGTSMASPHVAGAAALILSKNPNLSNSQVRQRLENTATPLGNSFYYGKGLINAQAAS

SEQ ID NO: 68285 - protein, 274 aa, Bacillus pumilus
AQTVPYGIPQIKAPAVHAQGYKGANVKVAVLDTGIHAAHPDLNVAGGASFVPSEPNATQDFQSHGTHVAGTIAALDNTIGVLGVAPSAALYAVKVLDRNGDGQYSWIISGIEWAVANNMDVINMSLGGPNGSTALKNAVDTANNRGVVVVAAAGNSGSTGSTSTVGYPAKYDSTIAVANVNSSNVRNSSSSAGPELDVSAPGTSILSTVPNSGYTSYTGTSMASPHVAGAAALILSKNPNLSNSQVRQRLENTATPLGNSFYYGKGLINAQAAS

SEQ ID NO: 68286 - protein, 274 aa, Bacillus pumilus
AQTVPYGIPQIKAPAVHAQGYKGANVKVAVLDTGIHAAHPDLNVAGGASFVPSEPNATQDFESHGTHVAGTIAALDNTIGVFGVAPSASLYAVKVLDRNGDGQYSWIISGIEWAVANNMDVINMSLGGPNGSTALKNAVDTANNRGVVVVAAAGNSGSTGSTSTVGYPAKYDSTIAVANVNSSNVRNSSSSAGPELDVSAPGTSILSTVPSSGYTSYTGTSMASPHVAGAAALILSKNPNLSNSQVRQRLENTATPLGNSFYYGKGLINAQAAS

SEQ ID NO: 68287 - protein, 275 aa, Bacillus sp. LG1
AQTVPWGIPHIKADKAHAAGVTGSGVKVAILDTGIDANHADLNVKGGASFVSGEPNALNDGNGHGTHVAGTVAALNNTTGVLGVAYNADLYAVKVLSASGSGTLSGIAQGIEWSISNGMNVINMSLGGSSGSTALQQACNNAYNRGIVVIAAAGNSGSSGNRNTMGYPARYSSVIAVGAVSSNNTRASFSSVGSELEVMAPGVNILSTTPGNNYASFNGTSMAAPHVAGAAALIKAKYPSMTNVQIRERLKNTATNLGDPFFYGKGVINVESALQ

SEQ ID NO: 68288 - protein, 274 aa, Bacillus pumilus
AQTVPYGITQIKAPAVHAQGYKGANVKVAVLDTGIHAAHPDLNVAGGASFVPSEPNATQDFQSHGTHVAGTIAALDNTIGVLGVAPSASLYAVKVLDRNGDGQYSWIISGIEWAVANNMDVINMSLGGPDGSTALKNAVDTANKRGVVVVAAAGNSGSTGSTSTVAYPAKYDSTIAVANVNSSNVRNSSSSAGPELDVSAPGTSILSTVPSSGYTSYTGTSMASPHVAGAAALILSKNPNLSNSQVRQRLETTATPLGNSFYYGKGLINAEAAS

SEQ ID NO: 68289 - protein, 274 aa, Bacillus pumilus
AQTVPYGITQIKAPAVHAQGYKGANVKVAVLDTGIHAAHPDLNVAGGASFVPSEPNATQDFQSHGTHVAGTIAALDNTIGVLGVAPSASLYAVKVLDRNGDGQYSWIISGIEWAVANNMDVINMSLGGPDGSAALKNAVDTANKRGVVVVAAAGNSGSTGSTSTVGYPAKYDSTIAVANVNSSNVRNSSSSAGPELDVSAPGTSILSTVPSSGYTSYSGTSMASPHVAGAAALILSKNPNLSNSQVRQRLETTATPLGNSFYYGKGLINAEAAS

SEQ ID NO: 68290 - protein, 274 aa, Bacillus pumilus
AQTVPYGITQIKAPAVHAQGYKGANVKVAVLDTGIHAAHPDLNVAGGASFVPSEPNATQDFQSHGTHVAGTIAALDNTIGVLGVAPSASLYAVKVLDRNGDGQYSWIISGIEWAVANNMDVINMSLGGPNGSTALKNAVDTANNRGVVVVAAAGNSGSTGSTSTVGYPAKYGSTIAVANVNSSNVRNSSSSAGPELDVSAPGTSILSTVPSSGYTSYTGTSMASPHVAGAAALILSKNPNLSNSQVRQRLENTATPLGNSFYYGKGLINAEAAS

SEQ ID NO: 68291 - protein, 274 aa, Bacillus pumilus
AQTVPYGIHQIKAPAVHAQGYKGANVKVAVLDTGIHAAHPDLNVAGGASFVPSEPNATQDFQSHGTHVAGTIAALDNTIGVLGVAPSASLYAVKVLDRNGDGQYSWIISGIEWAVANNMDVINMSLGGPNGSTALKNAVDTANNRGVVVVAAAGNSGSTGSTSTVGYPAKYDSTIAVANVNSSNVRNSSSSAGPELDVSAPGTSILSTVPSSGYTSYTGTSMASPHVAGAAALILSKNPNLSNSQVRQRLENTATPLGNSFYYGKGLINAQAAS

SEQ ID NO: 68292 - protein, 274 aa, Bacillus pumilus
AQTVPYGITQIKAPAVHAQGYKGANVKVGVLDTGIHAAHPDLNVAGGASFVPSEPNATQDFQSHGTHVAGTIAALDNTIGVLGVAPSASLYAVKVLDRNGEGQYSWIISGIEWAVANNMDVINMSLGGPSSSTALKNAVDTANNRGVVVVAAAGNSGSTGSTSTVGYPAKYDSTIAVANVNSSNVRNSSSSAGPELDVSAPGTSILSTVPSSGYTCYTGTSMATPHVAGAAALILSKNPNLSNSQVRQRLESTATPLGNSFYYGKGLINAEAAS

SEQ ID NO: 68293 - protein, 274 aa, Bacillus pumilus
AQTVPYGIHQIKAPAVHDQGYKGANVKVAVLDTGIHAAHPDLNVAGGASFVPSEPNATQDFQSHGTHVAGTIAALDNTIGVLGVAPSASLYAVKVLDRNGDGQYSWIISGIEWAVANNMDVINMSLGGPDGSTALKNAVDTANKRGVVVVAAAGNSGSIGSTSTVGYPAKYDSTIAVANVNSSNVRNSSSSAGPELDVSAPGTSILSTVPSSGYTSYTGTSMASPHVAGAAALILSKNPNLSNSQVRQRLETTATPLGNSFYYGKGLINAEAAS

SEQ ID NO: 68294 - protein, 274 aa, Bacillus pumilus
AQTVPYGITQIKAPAVHAQGYKGANVKVAVLDTGIHAAHPDLNVAGGASFVPSEPNATQDFQSHGTHVAGTIAALDNTIGVLGVAPSASLYAVKVLDRNGDGQYSWIISGIEWAVANNMDVINMSLGGPDNSKALKNAVDTANLRGVVVVAAAGNSGSTGSTSTVGYPAKYDSTIAVANVNSSNVRNSSSSAGPELDVSAPGTSILSTVPSSGYTCYTGTSMASPHVAGAAALILSKNPNLSNSQVRQRLESTATPLGNSFYYGKGLINAEAAS

SEQ ID NO: 68295 - protein, 274 aa, Bacillus pumilus
AQTVPYGIPQIKAPAVHAQGYKGANVKVAVLDTGIHAAHPDLNVAGGASFVPSEPNATQDFQSHGTHVAGTIAALDNTIGVLGVAPSASLYAVKVLDRNGEGQYSWLLSGIEWAVANNMDVINMSLGGPNGSTALKNAVDTANNRGVVVVAAAGNSGSTGSTSTVGYPAKYDSTIAVANVNSSNVRNSSSSAGPELDVSAPGTSILSTVPSSGYTSYTGTSMASPHVAGAAALILSKNPNLSNSQVRQRLENTATPLGNSFYYGKGLINAQAAS

SEQ ID NO: 68296 - protein, 274 aa, Bacillus pumilus
AQTVPYGIPQIKAPAVHAQGYKGANVKVAVLDTGIHAEHPDLNVAGGTSFVPSEPNATQDFQSHGTHVAGTIAALDNTIGVLGVAPSASLYAVKVLDRNGNGQYSWIISGIEWAVANNMDVINMSLGGPDGSAALKNAVDTANKRGVVVVAAAGNSGSTGSTSTVGYPAKYDSTIAVANVNSSNVRNSSSSAGPELDVSAPGTSILSTVPSSGYTSYTGTSMASPHVAGAAALILSKNPNLSNSQVRQRLETTATPLGNSFYYGKGLINAEAAS

SEQ ID NO: 68297 - protein, 274 aa, Bacillus pumilus
AQTVPYGITQIKAPAVHAQGYKGANVKVAVLDTGIHAAHPDLNVAGGASFVPSEPNATQDFQSHGTHVAGTIAALDNTIGVLGVAPSASLYAVKVLDRNGDGQYSWIISGIEWAVANNMDVINMSLGGPDGSAALKNAVDTANKRGVVVVAAAGNSGSTGSTSTVGYPAKYDSTIAVANVNSSNVRNSSSSAGPELDVSAPGTSILSTVPSSGYTSYTGTSMASPHVAGAAALILSKNPNLSNSQVRQRLETTATPLGNSFYYGKGLINAEAAS

SEQ ID NO: 68298 - protein, 274 aa, Bacillus pumilus
AQTVPYGIPQIKAPAVHAQGYKGANVKVAVLDTGIHAAHPDLNAAGGASFVPSEPNATQDFQSHGTHVAGTIAALDNTIGVLGVAPSASLYAVKALDRNGDGQYSWIISGIEWAVANNMDVINMSLGGASGSTALKNAVDTANSRGVVAVAAAGNSGSSGSRSTVGYPAKYESTIAVANVNSNNVRNSSSSAGPELDVSAPGTSILSTVPSSGYTSYTGTSMASPHVAGAAALILSKNPNLTNSQVRQRLENTATPLGDSFYYGKGLINVQAAS

SEQ ID NO: 68299 - protein, 274 aa, Bacillus pumilus
AQTVPYGITQIKAPAVHAQGYKGANVKVAVLDTGIHAAHPDLNVAGGASFVPSEPNATQDFQSHGTHVAGTIAALDNTIGVLGVAPSASLYAVKVLDRNGDGQYSWIISGIEWAVANNMDVINMSLGGPDGSAALKNAVDTANKRGVVVVAAAGNSGSTGSTSTVGYPAKYDSTIAVANVNSSNVRNSSSSAGPELDVSAPGTSILSTVPNSGYTSMTGTSMASPHVAGAAALILSKNPNLSNSQVRQRLETTATPLGNSFYYGKGLINAEAAS

SEQ ID NO: 68300 - protein, 274 aa, Bacillus pumilus
AQTVPYGITQIKAPAVHAQGYKGANVKVAVLDTGIHAAHPDLNVAGGASFVPSEPNATQDFQSHGTHVAGTIAALDNTIGVLGVAPSASLYAVKVLDRNGDGQYSWIISGIEWAVANNMDVINMSLGGPDGSTALKNAVDTANKRGVVIVAAAGNSGSTGSTSTVGYPAKYDSTIAVANVNSSNVRNSSSSAGPELDVSAPGTSILSTVPSSGYTSYTGTSMASPHVAGAAALILSKNPNLSNSQVRQRLETTATPLGNSFYYGKGLINAEAAS

SEQ ID NO: 68301 - protein, 274 aa, Bacillus pumilus
AQTVPYGITQIKAPAVHAQGYKGANVKVAVLDTGIHAAHPDLNVAGGASFVPTEPNATQDFQSHGTHVAGTIAALDNTIGVLGVAPSASLYAVKVLDRNGDGQYSWIISGIEWAVANNMNVINMSLGGPDGSAALKNAVDTANKRGVVVVAAAGNSGSSGSTSTVGYPAKYDSTIAVANVNSSNVRNSSSSAGPELDVSAPGTSILSTVPSSGYTSYTGTSMASPHVAGAAALILSKNPNLSNSQVRQRLETTATPLGNSFYYGKGLINAEAAS

SEQ ID NO: 68302 - protein, 274 aa, Bacillus pumilus
AQTVPYGITQIKAPAVHAQGYKGANVKVAVLDTGIHAAHPDLNVAGGASFVPSEPNATQDFQSHGTHVAGTIAALDNTIGVLGVAPSASLYAVKVLDRNGDGQYSWIISGIEWAVANNMDVINMSLGGPDGSKALKNAVDTANKRGVVVVAAAGNSGSTGSTSTVGYPAKYDSTIAVANVNSSNVRNSSSSAGPELDVSAPGTSILSTVPSSGYTSYTGTSMASPHVAGAAALILSKNPNLSNSQVRQRLETTATPLGNSFYYGKGLINAEAAS

SEQ ID NO: 68303 - protein, 274 aa, Bacillus pumilus
AQTVPYGITQIKAPAVHAQGYKGANVKVAVLDTGIHAAHPDLNVAGGASFVPSEPNATQDFQSHGTHVAGTIAALDNTIGVLGVAPSASLYAVKVLDRNGDGQYSWLLSGIEWAVANNMDVINMSLGGPNGSTALKNAVDTANKRGVVVVAAAGNSGSTGSTSTVGYPAKYDSTIAVANVNSSNVRNSSSSAGPELDVSAPGTSILSTVPSSGYTCYTGTSMASPHVAGAAALILSKNPNLSNSQVRQRLETTATPLGNSFYYGKGLINAEAAS

SEQ ID NO: 68304 - protein, 274 aa, Bacillus pumilus
AQTVPYGITQIKAPAVHAQGYKGANVKVAVLDTGIHAAHPDLNVAGGASFVPSEPNATQDFQSHGTHVAGTIAALDNTIGVLGVAPSASLYAVKVLDRNGDGQYSWIISGIEWAVANNMDVINMSLGGPNSSTALKNAVDTANNRGVVVVAAAGNSGSTGSTSTVGYPAKYDSTIAVANVNSSNVRNSSSSAGPELDVSAPGTSILSTVPSSGYTCYTGTSMASPHVAGAAALILSKNPNLSNSQVRQRLENTATPLGNSFYYGKGLINAEAAS

SEQ ID NO: 68305 - protein, 274 aa, Bacillus pumilus
AQTVPYGIPQIKAPAVHAQGYKGANVKVAVLDTGIHAAHPDLNVAGGASFVPSEPNATQDFQSHGTHVAGTIAALDNTIGVLGVAPSASLYAVKVLDRNGDGQYSWLLSGIEWAVANNMDVINMSLGGPKGSTALKNAVDTANNRGVVVVAAAGNSGSTGSTSTVGYPAKYDSTIAVANVNSSNVRNSSSSAGPELDVSAPGTSILSTVPSSGYTSYTGTSMASPHVAGAAALILSKNPNLSNSQVRQRLENTATPLGNSFYYGKGLINAQAAS

SEQ ID NO: 68306 - protein, 274 aa, Bacillus pumilus
AQTVPYGITQIKAPAVHAQGYKGANVKVAVLDTGIHAAHPDLNVAGGASFVPSEPNATQDFQSHGTHVAGTIAALDNTIGVLGVAPSASLYAVKVLDRNGDGQYSWIISGIEWAVANNMDVINMSLGGPDGSTALKNAVDTANKRGVVVVAAAGNSGSTGSTSTVGYPAKYPSTIAVANVNSSNVRNSSSSAGPELDVSAPGTSILSTVPSSGYTSYTGTSMASPHVAGAAALILSKNPNLSNSQVRQRLETTATPLGNSFYYGKGLINAEAAS

SEQ ID NO: 68307 - protein, 274 aa, Bacillus pumilus
AQTVPYGITQIKAPAVHAQGYKGANVKVAVLDTGIHAAHPDLNVAGGASFVPSEPNATQDFQSHGTHVAGTIAALDNTIGVLGVAPSASLYAVKVLDRNGDGQYSWIISGIEWAVANNMDVINMSLGGPDGSAALKNAVDTANKRGVVVVAAAGNSGSTGSTSTVGYPAKYDSTIAVANVNSSNVRNSTSSAGPELDVSAPGTSILSTVPSSGYTSMTGTSMASPHVAGAAALILSKNPNLSNSQVRQRLETTATPLGNSFYYGKGLINAEAAS

SEQ ID NO: 68308 - protein, 274 aa, Bacillus pumilus
AQTVPYGITQIKAPAVHAQGYKGANVKVAVLDTGIHAAHPDLNVAGGASFVPSEPNATQDFQSHGTHVAGTIAALDNTIGVLGVAPSASLYAVKVLDRNGDGQYSWIISGIEWAVANNMDVINMSLGGPDGSTALKNAVDTANKRGVVVVAAAGNSGSTGSSSTVGYPAKYDSTIAVANVNSSNVRNSSSSAGPELDVSAPGTSILSTVPSSGYTSYTGTSMASPHVAGAAALILSKNPNLSNSQVRQRLETTATPLGNSFYYGKGLINAEAAS

SEQ ID NO: 68309 - protein, 274 aa, Bacillus pumilus
AQTVPYGIPQIKAPAVHAQGYKGANVKVAVLDTGIHAAHPDLNVAGGASFVPSEPNATQDFQSHGTHVAGTIAALDNTIGVLGVAPSASLYAVKVLDRNGDGQYSWIISGIEWAVANNMDVINMSLGGPNGSTALKNAVDTANNRGVVVVAAAGNSGSTGSTSTVMYPAKYDSTIAVANVNSSNVRNSTSSAGPELDVSAPGTSILSTVPSSGYTSYTGTSMASPHVAGAAALILSKNPNLSNSQVRQRLENTATPLGNSFYYGKGLINAQAAS

SEQ ID NO: 68310 - protein, 274 aa, Bacillus pumilus
AQTVPYGIPQIKAPAVHAQGYKGANVKVAVLDTGIHAAHPDLNVAGGASFVPSEPNATQDFQSHGTHVAGTIAALDNTIGVLGVAPSASLYAVKVLDRNGDGQYSWIISGIEWAVANNMDVINMSLGGPDGSRALKNAVDTANNRGVVVVAAAGNSGSTGSTSTVGYPAKYDSTIAVANVNSSNVRNSSSSAGPELDVSAPGTSILSTVPSSGYTSYTGTSMAAPHVAGAAALILSKNPNLSNSQVRQRLENTATPLGNSFYYGKGLINAEAAS

SEQ ID NO: 68311 - protein, 274 aa, Bacillus pumilus
AQTVPYGIPQIKAPAVHAQGYKGANVKVAVLDTGIHAAHPDLNVAGGASFVPSEPNATQDFQSHGTHVAGTIAALDNTIGVLGVAPSASLYAVKVLDRNGDGQYSWIISGIEWAVANNMDVINMSLGGPNHSTALKNAVDTANNRGVVVVAAAGNSGSTGSTSTVGYPAKYDSTIAVANVNSSNVRNSTSSAGPELDVSAPGTSILSTVPSSGYTSYTGTSMASPHVAGAAALILSKNPNLSNSQVRQRLENTATPLGNSFYYGKGLINAQAAS

SEQ ID NO: 68312 - protein, 274 aa, Bacillus pumilus
AQTVPYGIPQIKAPAVHAQGYKGANVKVAVLDTGIHAAHPDLNVAGGASFVPSEPNATQDFQSHGTHVAGTIAALDNTIGVLGVAASASLYAVKVLDRNGDGQYSWIISGIEWAVANNMDVINMSLGGPNGSTALKNAVDTANNRGVVVVAAAGNSGSTGSTSTVGYPAKYDSTIAVANVNSSNVRNSSSSAGPELDVSAPGTSILSTVPSSGYTSYTGTSMASPHVAGAAALILSKNPNLSNSQVRQRLENTATPLGNSFYYGKGLINAQAAS

SEQ ID NO: 68313 - protein, 274 aa, Bacillus pumilus
AQTVPYGIPQIKAPAVHAQGYKGANVKVAVLDTGIHAAHPDLNVAGGASFVPSEPNATQDFHSHGTHVAGTIAALDNTIGVLGVAPSASLYAVKVLDRNGDGQYSWLLSGIEWAVANNMDVINMSLGGPNGSTALKNAVDTANNRGVVVVAAAGNSGSTGSTSTVGYPAKYDSTIAVANVNSSNVRNSSSSAGPELDVSAPGTSILSTVPSSGYTSYTGTSMASPHVAGAAALILSKNPNLSNSQVRQRLENTATPLGNSFYYGKGLINAQAAS

SEQ ID NO: 68314 - protein, 274 aa, Bacillus pumilus
AQTVPYGITQIKAPAVHAQGYKGANVKVAVLDTGIHAAHPDLNVAGGASFVPSEPNATQDFQSHGTHVAGTIAALDNTIGVLGVAPSASLYAVKVLDRNGDGQYSWIISGIEWAVANNMDVINMSLGGPVGSAALKNAVDTANKRGVVVVAAAGNSGSTGSTSTVGYPAKYDSTIAVANVNSSNVRNSSSSAGPELDVSAPGTSILSTVPSSGYTSMTGTSMASPHVAGAAALILSKNPNLSNSQVRQRLETTATPLGNSFYYGKGLINAEAAS

SEQ ID NO: 68315 - protein, 274 aa, Bacillus pumilus
AQTVPYGITQIKAPAVHAQGYKGANVKVAVLDTGIHAAHPDLNVAGGASFVPSEPNATQDFQSHGTHVAGTIAALDNTIGVLGVAPSASLYAVKVLDRNGDGQYSWIISGIEWAVANNMDVINMSLGGPDGSAALKNAVDTANKRGVVVVAAAGNSGSTGSSSTVGYPAKYDSTIAVANVNSSNVRNSSSSVGPELDVSAPGTSILSTVPSSGYTSYTGTSMASPHVAGAAALILSKNPNLSNSQVRQRLETTATPLGNSFYYGKGLINAEAAS

SEQ ID NO: 68316 - protein, 274 aa, Bacillus pumilus
AQTVPYGITQIKAPAVHAQGYKGANVKVAVLDTGIHAAHPDLNVAGGASFVPSEPNATQDFQSHGTHVAGTIAALDNTIGVLGVAPSASLYAVKVLDRNGEGQYSWLLSGIEWAVANNMDVINMSLGGPNGSTALKNAVDTANNRGVVVVAAAGNSGSTGSTSTVGYPAKYDSTIAVANVNSSNVRNSSSSAGPELDVSAPGTSILSTVPSSGYTCYTGTSMASPHVAGAAALILSKNPNLSNSQVRQRLENTATPLGNSFYYGKGLINAEAAS

SEQ ID NO: 68317 - protein, 274 aa, Bacillus pumilus
AQTVPYGITQIKAPAVHAQGYKGANVKVAVLDTGIHAAHPDLNVAGGASFVPSEPNATQDFQSHGTHVAGTIAALDNTIGVLGVAPSASLYAVKVLDRNGDGQYSWIISGIEWAVANNMDVINMSLGGPDGSTALKNAVDTANKRGVVVVAAAGNSGSTGSSSTVGYPAKYDSTIAVANVNSSNVRNSSSSAGPELDVSAPGTSILSTVPSSGYTSMTGTSMASPHVAGAAALILSKNPNLSNSQVRQRLETTATPLGNSFYYGKGLINAEAAS

SEQ ID NO: 68318 - protein, 274 aa, Bacillus pumilus
AQTVPYGIPQIKAPAVHAQGYKGANVKVAVLDTGIHAAHPDLNVAGGASFVPSEPNATQDFQSHGTHVAGTIAALDNTIGVLGVAPSASLYAVKVLDRNGDGQYSWLLSGIEWAVANNMDVINMSLGGPNGSTALKNAVDTANKRGVVVVAAAGNSGSTGSTSTVGYPAKYDSTIAVANVNSSNVRNSSSSAGPELDVSAPGTSILSTVPSSGYTSYTGTSMASPHVAGAAALILSKNPNLSNSQVRQRLENTATPLGNSFYYGKGLINAQAAS

SEQ ID NO: 68319 - protein, 274 aa, Bacillus pumilus
AQTVPWGIPQIKAPAVHAQGYKGANVKVAVLDTGIHAAHPDLNVAGGASFVPSEPNATQDFQSHGTHVAGTIAALDNTIGVLGVAPSASLYAVKVLDRNGDGQYSWIISGIEWAVANNMDVINMSLGGPNGSTALKNAVDTANNRGVVVVAAAGNSGSTGSTSTVGYPAKYDSTIAVANVNSSNVRNSTSSAGPELDVSAPGTSILSTVPSSGYTSYTGTSMASPHVAGAAALILSKNPNLSNSQVRQRLENTATPLGNSFYYGKGLINAQAAS

SEQ ID NO: 68320 - protein, 274 aa, Bacillus pumilus
AQTVPYGITQIKAPAVHAQGYKGANVKVAVLDTGIHAAHPDLNVAGGASFVPSEPNATQDFQSHGTHVAGTIAALDNTIGVLGVAPSASLYAVKVLDRNGDGQYSWLLSGIEWAVANNMDVINMSLGGPNGSTALKNAVDTANNRGVVVVAAAGNSGSTGSTSTVGYPAKYDSTIAVANVNSSNVRNSSSSAGPELDVSAPGTSILSTVPSSGYTCYTGTSMASPHVAGAAALILSKNPNLSNSQVRQRLENTATPLGNSFYYGKGLINAEAAS

SEQ ID NO: 68321 - protein, 274 aa, Bacillus pumilus
AQTVPYGITQIKAPAVHAQGYKGANVKVAVLDTGIHAAHPDLNVAGGASFVPSEPNATQDFQSHGTHVAGTIAALDNTIGVLGVAPSASLYAVKVLDRNGDGQYSWIISGIEWAVANNMDVINMSLGGPDGSTALKNAVDTANKRGVVVVAAAGNSGSTGSTSTVQYPAKYDSTIAVANVNSSNVRNSSSSAGPELDVSAPGTSILSTVPSSGYTSYTGTSMASPHVAGAAALILSKNPNLSNSQVRQRLETTATPLGNSFYYGKGLINAEAAS

SEQ ID NO: 68322 - protein, 274 aa, Bacillus pumilus
AQTVPYGITQIKAPAVHAQGYKGANVKVAVLDTGIHAAHPDLNVAGGASFVPSEPNATQDFQSHGTHVAGTIAALDNTIGVLGVAPSASLYAVKVLDRNGDGQYSWIISGIEWAVANNMDVINMSLGGPDGSAALKNAVDTANKRGVVVVAAAGNSGSTGSTSTVGYPAKYDSTIAVANVNSSNVRNSSSSAGPELDVSAPGTSILSTVPSSGYTSMTGTSMASPHVAGAAALILSKNPNLSNSQVRQRLETTATPLGNSFYYGKGLINAEAAS

SEQ ID NO: 68323 - protein, 274 aa, Bacillus pumilus
AQTVPYGITQIKAPAVHAQGYKGANVKIAVLDTGIHAAHPDLNVAGGASFVPSEPNATQDFQSHGTHVAGTIAALDNTIGVLGVAPSASLYAVKVLDRNGDGQYSWIISGIEWAVANNMDVINMSLGGPNGSTALKNAVDTANNRGVVVVAAAGNSGSTGSTSTVGYPAKYDSTIAVANVNSSNVRNSSSSAGPELDVSAPGTSILSTVPSSGYTCYTGTSMASPHVAGAAALILSKNPNLSNSQVRQRLENTATPLGNSFYYGKGLINAEAAS

SEQ ID NO: 68324 - protein, 274 aa, Bacillus pumilus
AQTVPYGITQIKAPAVHAQGYKGANVKVAVLDTGIHAAHPDLNVAGGASFVPSEPNATQDFQSHGTHVAGTIAALDNTIGVVGVAPSASLYAVKVLDRNGDGQYSWIISGIEWAVANNMDVINMSLGGPNGSTALKNAVDTANNRGVVVVAAAGNSGSTGSTSTVGYPAKYDSTIAVANVNSSNVRNSSSSAGPELDVSAPGTSILSTVPSSGYTCYTGTSMASPHVAGAAALILSKNPNLSNSQVRQRLENTATPLGNSFYYGKGLINAEAAS

SEQ ID NO: 68325 - protein, 274 aa, Bacillus pumilus
AQTVPYGIPQIKAPAVHAQGYKGANVKVAVLDTGIHAAHPDLNVAGGASFVPSEPNATQDFQSHGTHVAGTIAALDNTIGVLGVAPSAALYAVKVLDRNGDGQYSWIISGIEWAVANNMDVINMSLGGPNGSTALKNAVDTANNRGVVVVAAAGNSGSTGSTSTVGYPAKYDSTIAVANVNSSNVRNSTSSAGPELDVSAPGTSILSTVPSSGYTSYTGTSMASPHVAGAAALILSKNPNLSNSQVRQRLENTATPLGNSFYYGKGLINAQAAS

SEQ ID NO: 68326 - protein, 274 aa, Bacillus pumilus
AQTVPYGITQIKAPAVHAQGYKGANVKVAVLDTGIHAAHPDLNVAGGASFVPSEPNATQDFQSHGTHVAGTIAALDNTIGVLGVAPSASLYAVKVLDRNGDGQYSWIISGIEWAVANNMDVINMSLGGPDGSTALKNAVDTANKRGVVVVAAAGNSGSTGSTSTVGYPAKYDSTIAVANVNSSNVRNSSSSAGPELDVSAPGTSILSTVPSSGYTSYTGTSMAAPHVAGAAALILSKNPNLSNSQVRQRLETTATPLGNSFYYGKGLINAEAAS

SEQ ID NO: 68327 - protein, 274 aa, Bacillus pumilus
AQTVPYGITQIKAPAVHAQGYKGANVKVAVLDTGIHAAHPDLNVAGGASFVPSEPNATQDFQSHGTHVAGTIAALDNTIGVLGVAPSASLYAVKVLDRNGDGQYSWIISGIEWAVANNMDVINMSLGGPDGSTALKNAVDTANKRGVVVVAAAGNQGSTGSTSTVGYPAKYDSTIAVANVNSSNVRNSSSSAGPELDVSAPGTSILSTVPSSGYTSYTGTSMASPHVAGAAALILSKNPNLSNSQVRQRLETTATPLGNSFYYGKGLINAEAAS

SEQ ID NO: 68328 - protein, 274 aa, Bacillus pumilus
AQTVPYGITQIKAPAVHAQGYKGANVKVAVLDTGIHAAHPDLNVAGGASFVPSEPNATQDFQSHGTHVAGTIAALDNTIGVLGVAPSASLYAVKVLDRNGDGQYSWIISGIEWAVANNMDVINMSLGGPDGSAALKNAVDTANKRGVVVVAAAGNSGSTGSSSTVGYPAKYDSTIAVANVNSSNVRNSSSSVGPELDVSAPGTSILSTVPSSGYTSMTGTSMASPHVAGAAALILSKNPNLSNSQVRQRLETTATPLGNSFYYGKGLINAEAAS

SEQ ID NO: 68329 - protein, 274 aa, Bacillus pumilus
AQTVPYGITQIKAPAVHAQGYKGANVKVAVLDTGIHAAHPDLNVAGGASFVPSEPNATQDFQSHGTHVAGTIAALDNTIGVLGVAPSASLYAVKVLDRNGDGQYSWIISGIEWAVANNMDVINMSLGGPDGSRALKNAVDTANKRGVVVVAAAGNSGSTGSTSTVGYPAKYDSTIAVANVNSSNVRNSSSSAGPELDVSAPGTSILSTVPSSGYTSYTGTSMASPHVAGAAALILSKNPNLSNSQVRQRLETTATPLGNSFYYGKGLINAEAAS

SEQ ID NO: 68330 - protein, 274 aa, Bacillus pumilus
AQTVPYGITQIKAPAVHAQGYKGANVKVAVLDTGIHAAHPDLNVAGGASFVPSEPNATQDFQSHGTHVAGTIAALDNTIGVLGVAPSASLYAVKVLDRNGDGQYSWIISGIEWAVANNMDVINMSLGGPNGSTALKNAVDTANNRGVVVVAAAGNSGSTGSTSTVGYPAKYDSTIAVANVNSSNVRNSSSSAGPELDVSAPGTSILSTVPSSGYTSYTGTSMASPHVAGAAALILSKNPNLSNSQVRQRLENTATPLGNSFYYGKGLINAQAAS

SEQ ID NO: 68331 - protein, 274 aa, Bacillus pumilus
AQTVPYGIPQIKAPAVHAQGYKGANVKVAVLDTGIHAAHPDLNVAGGASFVPSEPNATQDFQSHGTHVAGTIAALDNTIGVLGVAPSASLYAVKVLDRNGDGQYSWLLSGIEWAVANNMDVINMSLGGPNGSTALKNAVDTANNRGVVVVAAAGNSGSTGSTSTVGYPAKYDSTIAVANVNSSNVRNSSSSAGPELDVSAPGTSILSTVPSSGYTCYTGTSMASPHVAGAAALILSKNPNLSNSQVRQRLENTATPLGNSFYYGKGLINAQAAS

SEQ ID NO: 68332 - protein, 274 aa, Bacillus pumilus
AQTVPYGITQIKAPAVHAQGYKGANVKVAVLDTGIHAAHPDLNVAGGASFVPSEPNATQDFQSHGTHVAGTIAALDNTIGVLGVAPSASLYAVKVLDRNGDGQYSWIISGIEWAVANNMDVINMSLGGPDGSTALKNAVDTANKRGVVVVAAAGNYGSTGSTSTVGYPAKYDSTIAVANVNSSNVRNSSSSAGPELDVSAPGTSILSTVPSSGYTSYTGTSMASPHVAGAAALILSKNPNLSNSQVRQRLETTATPLGNSFYYGKGLINAEAAS

SEQ ID NO: 68333 - protein, 274 aa, Bacillus pumilus
AQTVPYGITQIKAPAVHAQGYKGANVKVAVLDTGIHAAHPDLNVAGGASFVPSEPNATQDFQSHGTHVAGTIAALDNTIGVLGVAPSASLYAVKVLDRNGDGQYSWIISGIEWAVANNMDVINMSLGGPDGSTALKNAVDTANKRGVVVVAAAGNSGSTGSTSTVMYPAKYDSTIAVANVNSSNVRNSSSSAGPELDVSAPGTSILSTVPSSGYTSYTGTSMASPHVAGAAALILSKNPNLSNSQVRQRLETTATPLGNSFYYGKGLINAEAAS

SEQ ID NO: 68334 - protein, 274 aa, Bacillus pumilus
AQTVPYGITQIKAPAVHAQGYKGANVKVAVLDTGIHAAHPDLNVAGGASFVPSEPNATQDFQSHGTHVAGTIAALDNTIGVLGVAPSASLYAVKVLDRNGDGQYSWIISGIEWAVANNMDVINMSLGGPDGSTALKNAVDTANKRGVVVVAAAGNSGSTGSSSTVMYPAKYDSTIAVANVNSSNVRNSSSSVGPELDVSAPGTSILSTVPSSGYTSMTGTSMASPHVAGAAALILSKNPNLSNSQVRQRLETTATPLGNSFYYGKGLINAEAAS

SEQ ID NO: 68335 - protein, 274 aa, Bacillus pumilus
AQTVPYGITQIKAPAVHAQGYKGANVKVAVLDTGIHAAHPDLNVAGGASFVPSEPNATQDFQSHGTHVAGTIAALDNTIGVLGVAPSASLYAVKVLDRNGDGQYSWIISGIEWAVANNMDVINMSLGGPDGSRALKNAVDTANKRGVVVVAAAGNSGSTGSTSTVGYPAKYDSTIAVANVNSSNVRNSSSSAGPELDVSAPGTSILSTVPSSGYTSMTGTSMASPHVAGAAALILSKNPNLSNSQVRQRLETTATPLGNSFYYGKGLINAEAAS

SEQ ID NO: 68336 - protein, 274 aa, Bacillus pumilus
AQTVPYGIPQIKAPAVHAQGYKGANVKVAVLDTGIHAAHPDLNVAGGASFVPSEPNATQDFQSHGTHVAGTIAALDNTIGVLGVAPSASLYAVKVLDRNGDGQYSWLLSGIEWAVANNMDVINMSLGGPNGSTALKNAVDTANNRGVVVVAAAGNSGSTGSTSTVGYPAKYDSTIAVANVNSSNVRNSSSSAGPELDVSAPGTSILSTVPSSGYTSYTGTSMASPHVAGAAALILSKNPNLSNSQVRQRLENTATPLGNSFYYGKGLINAQAAS

SEQ ID NO: 68337 - protein, 274 aa, Bacillus pumilus
AQTVPYGIPQIKAPAVHAQGYKGANVKVAVLDTGIHAAHPDLNVAGGASFVPSEPNATQDFQSHGTHVAGTIAALDNTIGVLGVAPSASLYAVKVLDRNGEGQYSWIISGIEWAVANNMDVINMSLGGPDGSRALKNAVDTANNRGVVVVAAAGNSGSTGSTSTVGYPAKYDSTIAVANVNSSNVRNSSSSAGPELDVSAPGTSILSTVPSSGYTSYTGTSMAAPHVAGAAALILSKNPNLSNSQVRQRLENTATPLGNSFYYGKGLINAEAAS

SEQ ID NO: 68338 - protein, 275 aa, Bacillus sp. LG1
AQTVPWGIPHIKADKAHAAGVTGSGVKVAILDTGIDANHADLNVKGGASFVSGEPNTLQDGNGHGTHVAGTVAALNNTTGVLGVAYNADLYAVKVLSASGSGTLSGIAQGIEWSISNGMNVINMSLGGSSGSTALQQACNNAYNRGIVVIAAAGNSGSSGNRNTMGYPARYSSVIAVGAVSSNNTRASFSSVGSELEVMAPGVNILSTTPGNNYASFNGTSMAAPHVAGAAALIKAKYPSMTNVQIRERLKNTATNLGDPFFYGKGVINVESALQ

SEQ ID NO: 68339 - protein, 274 aa, Bacillus pumilus
AQTVPYGITQIKAPAVHAQGYKGANVKVAVLDTGIHAAHPDLNVAGGASFVPSEPNATQDFQSHGTHVAGTIAALDNTIGVLGVAPSASLYAVKVLDRNGDGQYSWIISGIEWAVANNMDVINMSLGGPDGSTALKNAVDTANKRGVVVVAAAGNSGSTGSTSTVGYPAKYGSTIAVANVNSSNVRNSSSSAGPELDVSAPGTSILSTVPSSGYTSYTGTSMASPHVAGAAALILSKNPNLSNSQVRQRLETTATPLGNSFYYGKGLINAEAAS

SEQ ID NO: 68340 - protein, 274 aa, Bacillus pumilus
AQTVPYGITQIKAPAVHAQGYKGANVKVAVLDTGIHAAHPDLNVAGGASFVPSEPNATQDFQSHGTHVAGTIAALDNTIGVLGVAPSASLYAVKVLDRNGDGQYSWIISGIEWAVANNMDVINMSLGGPDGSAALKNAVDTANKRGVVVVAAAGNSGSTGSTSTVGYPAKYDSTIAVANVNSSNVRNSSSSAGPELDVSAPGTSILSTVPNSGYTSYTGTSMASPHVAGAAALILSKNPNLSNSQVRQRLETTATPLGNSFYYGKGLINAEAAS

SEQ ID NO: 68341 - protein, 356 aa, Unidentified
AEEKVKYLIGFEEEAELEAFTEEIDQVGVFSVEEQSVAEDTLDIDVDIIDEYDYIDVLAVELDPEDVDALSEEAGISFIEEDIELSIQQTVPWGITRVQAPAVHNRGITGSGVRVAILDSGISTHEDLNVRGGVSFVPGEPTTADLNGHGTHVAGTVAALNNSIGVVGVAPSADLYAVKVLGANGRGSVSGIAQGLEWAAANNMHIANMSLGSDAPSSTLERAVNYATSRDVLVIAATGNNGSGSVGYPARYANAMAVGATDQNNRRANFSQYGTGIDIVAPGVNVQSTYPGNRYVSMNGTSMATPHVAGAAALVKQRYPSWNATQIRNHLKNTATNLGNSSQFGSGLVNAEAATR

SEQ ID NO: 68342 - protein, 269 aa, unidentified
AQSIPWGIERIGTPAAHASGFTGSGVSVAVLDTGIDPHSDLNVQGGVSFVPGESGADDGNGHGTHVAGTIAALDNDEGVLGVAPEVDLFAVKVLSASGSGSISSIAQGLEWTAENNIDVANLSLGSPSPSQTLEQAVNDATDSGVLVVAAAGNSGTSSLGYPARYDNAMAVGATDQSDSLASFSQYGEGLDLVAPGVGVESTYPGGGYDSLSGTSMAAPHVAGAAALVKQKNPGWTNEQIRSHLNDTANDLGDSFRFGSGLLNAENAVQ

SEQ ID NO: 68343 - protein, 269 aa, Synthetic construct
AQSIPWGIERIGTPAAHASGFTGSGVSVAVLDTGIDPHEDLNVQGGVSFVPGESGADDGNGHGTHVAGTIAALDNDEGVLGVAPEVDLFAVKVLSASGSGSISSIAQGLEWTAENNIDVANLSLGSPSPSQTLEQAVNDATDSGVLVVAAAGNSGTSSLGYPARYDNAMAVGATDQSDSLASFSQYGEGLDLVAPGVGVESTYPGGGYDSLSGTSMAAPHVAGAAALVKQKNPGWTNEQIRSHLNDTANDLGDSFRFGSGLLNAENAVQ

SEQ ID NO: 68344 - protein, 269 aa, Bacillus sp. B001
AQSIPWGIERIGTPAAQASGFTGSGVSVAVLDTGIDPHSDLNVQGGVSFVPGESGADDGNGHGTHVAGTIAALDNDEGVLGVAPEVDLFAVKVLSASGSGSISSIAQGLEWAAENNIDVANLSLGSPSPSQTLEQAVNDATDSGVLVVAAAGNSGTSSLGYPARYDNAMAVGATDQSDSLASFSQYGEGLDLVAPGVGVESTYPGGGYDSLSGTSMAAPHVAGAAALVKQKNPGWTNEQIRSHLNDTANDLGDSFRFGSGLLNAENAVQ

SEQ ID NO: 68345 - protein, 269 aa, Synthetic construct
AQSIPWGIERIGTPAAHASGFTGSGVSVAVLDTGIDPHEDLNVQGGVSFVPGESGADDGNGHGTHVAGTIAALDNDEGVLGVAPEVDLFAVKVLSASGSGSISSIAQGLEWTAENNIDVANLSLGSPSPSQTLEQAVNDATDSGVLVVAAAGNSGTSSLGYPARYDNAMAVGATDQSDQLASFSQYGEGLDLVAPGVGVESTYPGGGYDSLSGTSMAAPHVAGAAALVKQKNPGWTNEQIRSHLNDTANDLGDSFRFGSGLLNAENAVQ

SEQ ID NO: 68346 - protein, 269 aa, Synthetic construct
AQSIPWGIERIGTPAAHASGFTGSGVSVAVLDTGIDPHSDLNVQGGVSFVPGESGADDGNGHGTHVAGTIAALDNDEGVLGVAPEVDLFAVKVLSASGSGSISSIAQGLEWTAENNIDVANLSLGSPSPSQTLEQAVNDATDSGVLVVAAAGNSGTSSLQYPARYDNAMAVGATDQSDQLASFSQYGEGLDLVAPGVGVESTYPGGGYDSLSGTSMAAPHVAGAAALVKQKNPGWTNEQIRSHLNDTANDLGDSFRFGSGLLNAENAVQ

SEQ ID NO: 68347 - protein, 269 aa, Synthetic construct
AQSIPWGIERIGTPAAHASGFTGSGVSVAVLDTGIDPHSDLNVQGGVSFVPGESGADDGNGHGTHVAGTIAALDNDEGVLGVAPEVDLFAVKVLSASGSGSISSIAQGLEWTAENNIDVANLSLGSPSPSQTLEQAVNDATDSGVLVVAAAGNSGTSSLGYPARYDNAMAVGATDQSDQLASFSQYGEGLDLVAPGVGVESTYPGGGYDSLSGTSMAAPHVAGAAALVKQKNPGWTNEQIRSHLNDTANDLGDSFRFGSGLLNAENAVQ

SEQ ID NO: 68348 - protein, 269 aa, Synthetic construct
AQVIPWGIERIGTPAAHASGFTGSGVSVAVLDTGIDPHSDLNVQGGVSFVPGESGADDGNGHGTHVAGTIAALDNDEGVLGVAPEVDLFAVKVLSASGSGSISSIAQGLEWTAENNIDVANLSLGSPSPSQTLEQAVNDATDSGVLVVAAAGNSGTSSLGYPARYDNAMAVGATDQSDSLASFSQYGEGLDLVAPGVGVESTYPGGGYDSLSGTSMAAPHVAGAAALVKQKNPGWTNEQIRSHLNDTANDLGDSFLFGSGLLNAENAVQ

SEQ ID NO: 68349 - protein, 269 aa, Synthetic construct
AQSIPWGIERIGTPAAHASGFTGSGVSVAVLDTGIDPHEDLNVQGGVSFVPGESGADDGNGHGTHVAGTIAALDNDEGVLGVAPEVDLFAVKVLSASGSGSISSIAQGLEWTAENNIDVANLSLGSPSPSQTLEQAVNDATDSGVLVVAAAGNSGTSSLQYPARYDNAMAVGATDQSDSLASFSQYGEGLDLVAPGVGVESTYPGGGYDSLSGTSMAAPHVAGAAALVKQKNPGWTNEQIRSHLNDTANDLGDSFRFGSGLLNAENAVQ

SEQ ID NO: 68350 - protein, 269 aa, Synthetic construct
AQSIPWGIERIGTPAAHASGFTGSGVSVAVLDTGIDPHSDLNVQGGVSFVPGESGADDGNGHGTHVAGTIAALDNDEGVLGVAPEVDLFAVKVLSASGSGSISSIAQGLEWTAENNIDVANLSLGSPSPSQTLEQAVNDATDSGVLVVAAAGNSGTSSLQYPARYDNAMAVGATDQSDSLASFSQYGEGLDLVAPGVGVESTYPGGGYDSLSGTSMAAPHVAGAAALVKQKNPGWTNEQIRSHLNDTANDLGDSFRFGSGLLNAENAVQ

SEQ ID NO: 68351 - protein, 383 aa, Bacillus sp.
MKRKIGKLVVGLVCVTALVSVTDSASAAEEKVKYLIGFEKEAELEAFTDEVEQVGVFSIEEDQQKEDSTDIDVDIIFDYDYIPVLSVELDPEDVDALSEEDGIAYIEEDFEVSIQQSVPWGITRVQAPAAINRGTNGSGVRVAVLDTGISTHSDLTIRGGASFVPGEPNTSDLNGHGTHVAGTIAALNNSIGVVGVAPNADLYAVKVLGANGRGSIGGIAQGLGWAAANNMHIANLSLGSDAPSSTLEQAVNYATSRGVLVIAASGNNGSGNVGYPARYANAMAVGATDQNNNRANFSQYGAGLDIVAPGVGIQSTYPGNRYASLNGTSMATPHVAGAAALVKQRYPSWSASQIRNHLKNTSTNLGSSTLYGSGLVNADAASR

SEQ ID NO: 68352 - protein, 383 aa, Bacillus sp.
MKRKIGKLVVGLVCVTALVSVTDSASAAEEKVKYLIGFEKEAELEAFTDEVEQVGVFSIEEDQQKEDSTDIDVDIIFDYDYIPVLSVELDPEDVDALSEEDGIAYIEEDFEVSIQQSVPWGITRVQAPAAINRGTNGSGVRAAVLDTGISTHSDLTIRGGASFVPGEPNTSDLNGHGTHVAGTIAALNNSIGVVGVAPNADLYAVKVLGANGRGSIGGIAQGLEWAAANNMHIANLSLGSDAPSSTLEQAVNYATSRGVLVIAASGNNGSGNVGYPARYANAMAVGATDQNNNRANFSQYGAGLDIVAPGVGIQSTYPGNRYASLNGTSMATPHVAGAAALVKQRYPSWSASQIRNHLKNTSTNLGSSTLYGSGLVNADAASR

SEQ ID NO: 68353 - protein, 273 aa, Bacillus pumilus
AQTVPYGITQIKAPAVHAQGYKGANVKVAVLDTGIHAAHPDLNVAGGASFVPSEPNATQDFQSHGTHVAGTIAALDNTIGVLGVAPSASLYAVKVLDRNGDGQYSWIISGIEWAVANNMDVINMSLGGPDGSAALKNAVDTANKRGVVVVAAAGNSGSTGSTSTVMYPAKYDSTIAVANVNSSNVRNSSSSAGPELDVSAPGTSILSTVPSSGYTSMTGTSMASPHVAGAAALILSKNPNLSNSQVRQRLETTATPLGNSFYYGKGLINAEAA

SEQ ID NO: 68354 - protein, 381 aa, Unidentified
KKMWTKFIAGAALFLSISLTSSVVSAEEIKKQYLIGFENQLQVTEFLEATEKGNDQVSLFAEVNNDTVEMELLYEFEEIPVVSVELSPEDVQSLKKDPSIAYVEEDVEVKIANQTTPWGITRVQAPTALNRGFTGSGVRVAVLDTGIATHSDLNIRGGVSFVSGEPGYQDGNGHGTHVAGTIAALNNSIGVIGVAPNAELYAVKVLGANGSGSVSAIAQGLQWSAQNNMHIANLSLGSPTGSQTLELAVNQANSAGVLVVAASGNNGSGTVSYPARYTNALAVGATDQNNNRASFSQYGTGLNIVAPGVGVQSTYPGNRYASLNGTSMATPHVAGVAALVKQKNPSWSNTQIRNHLLNTATSLGSSTQFGSGLVNAEAATR

SEQ ID NO: 68355 - protein, 381 aa, Bacillus sp.
KKLFTKVVAGAALLLSISLSTTSISAEEQKKQYLIGFENQVSVTEFVESSEKGKDEFSIFAEINDETIEMDLLYEFEDIPVVSVEVSPEDVKDLEGDPSIAFIEEDIEVSIFNQTIPWGITRVQAPAAINRGFTGAGVRVAVLDTGISNHPDLNIRGGVSFVPGESTYQDGNGHGTHVAGTIAALNNSIGVVGVAPNTELYAVKVLGANGSGSISSIAQGLQWTAQNNIHVANLSLGSSTGSQTLELAVNQATSAGVLVVAASGNNGSGTISYPARYANALAVGATDQNNNRASFSQYGTGLNIVAPGVGVQSTYPGNRYASLSGTSMATPHVAGVAALVKQKNPSWSNTQIRQHLLNTATPLGSSNQYGSGLVNAEAATR

SEQ ID NO: 68356 - protein, 275 aa, Bacillus subtilis
AQTTPWGITHINAHKAHSSSVTGSGVKVAVLDTGIDASHEDLNVKGGASFISGEPNALVDTNGHGTHVSGTVAALDNTIGVVGVAYNADLYAVKVLSASGSGTLSGIAQGVEWAIANNMDVINMSLGGSSGSTALKQAVDNAYASGIVVVAAAGNSGTRGRQNTMGYPARYSSVIAVGAVDSNNNRASFSSVGAELEVMAPGVSVLSTVPGGGYASYNGTSMASPHVAGAAALIKAKYPSLSASQIRDRLRNTATYLGDPFYYGNGVINVERALQ

SEQ ID NO: 68357 - protein, 275 aa, Bacillus subtilis
AQTTPWGIEHINAHKAHSSSVTGSGVKVAVLDTGIDASHPDLNVKGGASFISGEPNALVDTNGHGTHVAGTVAALNNTIGVVGVAYNADLYAVKVLSASGSGTLSGIAQGVEWAIANNMDVINMSLGGSSGSTALKQAVDNAYASGIVVVAAAGNSGTRGRQNTMQYPARYSSVIAVGAVDSNNNRASFSSVGAELEVMAPGVSVLSTVPGGGYASYNGTSMASPHVAGAAALIKAKYPSLSASQIRDRLRNTATYLGPPFYYGNGVINVERALQ

SEQ ID NO: 68358 - protein, 275 aa, Bacillus subtilis
AQTTPWGITHINAHKAHSSSVTGSGVKVAVLDTGIDASHPDLNVKGGASFISGEPNALVDTNGHGTHVSGTVAALDNNIGVVGVAYNADLYAVKVLSASGSGTLSGIAQGVEWAIANNMDVINMSLGGSSGSTALKQAVDNAYASGIVVVAAAGNSGTRGRQNTMGYPARYSSVIAVGAVDSNNNRASFSSVGAELEVMAPGVSVLSTVPGGGYASYNGTSMASPHVAGAAALIKAKYPSLSASQIRDRLRNTATYLGDPFYYGNGVINVERALQ

SEQ ID NO: 68359 - protein, 275 aa, Bacillus subtilis
AQTTPWGITHINAHKAHSSSVTGSGVKVAVLDTGIDASHEDLNVKGGASFISGEPNALVDTNGHGTHVAGTVAALDNTIGVVGVAYNADLYAVKVLSASGSGTLSGIAQGVEWAIANNMDVINMSLGGSSGSTALKQAVDNAYASGIVVVAAAGNSGTRGRQNTMGYPARYSSVIAVGAVDSNNNRASFSSVGAELEVMAPGVSVLSTVPGGGYASYSGTSMASPHVAGAAALIKAKYPSLSASQIRDRLRNTATYLGDPFYYGNGVINVERALQ

SEQ ID NO: 68360 - protein, 275 aa, Bacillus sp.
AQTVPWGIPHIKADKAHAAGVTGSGVKVAILDTGIDANHADLNVKGGASFVAGEPNALQDGNGHGTHVAGTVAALDNTTGVLGVAPSVSLYAVKVLGASGSGSVSSIAQGLEWAGNNGMHVANLSLGSPSPSATLEQAVNSATSRGVLVVAAAGNSGTSGNRNTMDYPARYSSVIAVGAVSSNNTRASFSSVGSELEVMAPGVNILSTYPGSTYATLNGTSMATPHVAGAAALIKAKYPSMTNVQIRNRLKNTATNLGDPFFYGKGVINVESALQ

SEQ ID NO: 68361 - protein, 275 aa, Bacillus subtilis
AQTTPWGITHINAHKAHSSSVTGSGVKVAVLDTGIDASHPDLNVKGGASFISGEPNALVDTNGHGTHVSGTVAALNNTIGVVGVAYNADLYAVKVLSASGSGTLSGIAQGVEWAIANNMDVINMSLGGSSGSTALKQAVDNAYASGIVVVAAAGNSGTRGRQNTMGYPARYSSVIAVGAVDSNNNRASFSSVGAELEVMAPGVSVLSTVPGGGYASYNGTSMASPHVAGAAALIKAKYPSLSASQIRDRLRNTATYLGPPFYYGNGVINVERALQ

SEQ ID NO: 68362 - protein, 275 aa, Bacillus subtilis
AQTTPWGITHINAHKAHSSSVTGSGVKVAVLDTGIDASHEDLNVKGGASFISGEPNALVDTNGHGTHVAGTVAALDNTIGVVGVAYNADLYAVKVLSASGSGTLSGIAQGVEWAIANNMDVINMSLGGSSGSTALKQAVDNAYASGIVVVAAAGNSGTRGRQNTMQYPARYSSVIAVGAVDSNNNRASFSSVGAELEVMAPGVSVLSTVPGGGYASYNGTSMASPHVAGAAALIKAKYPSLSASQIRDRLRNTATYLGDPFYYGNGVINVERALQ

SEQ ID NO: 68363 - protein, 275 aa, Bacillus subtilis
AQTTPWGITHINAHKAHSSSVTGSGVKVAVLDTGIDASHPDLNVKGGASFISGEPNALVDTNGHGTHVAGTVAALNNTIGVVGVAYNADLYAVKVLSASGSGTLSGIAQGVEWAIANNMDVINMSLGGSSGSTALKQAVDNAYASGIVVVAAAGNSGTRGRQNTMQYPARYSSVIAVGAVDSNNNRASFSSVGAELEVMAPGVSVLSTVPGGGYASYNGTSMASPHVAGAAALIKAKYPSLSASQIRDRLRNTATYLGPPFYYGNGVINVERALQ

SEQ ID NO: 68364 - protein, 275 aa, Bacillus subtilis
AQTTPWGITHINAHKAHSSSVTGSGVKVAVLDTGIDASHPDLNVKGGASFISGEPNALVDTNGHGTHVAGTVAALNNTIGVVGVAYNADLYAVKVLSASGSGTLSGIAQGVEWAIANNMDVINMSLGGPSGSTALKQAVDNAYASGIVVVAAAGNSGTRGRQNTMGYPARYSSVIAVGAVDSNNQRASFSSVGAELEVMAPGVSVLSTVPGGGYASYNGTSMASPHVAGAAALIKAKYPSLSASQIRDRLRNTATYLGDPFYYGNGVINVERALQ

SEQ ID NO: 68365 - protein, 275 aa, Bacillus subtilis
AQTTPWGITHINAHKAHSSSVTGSGVKVAVLDTGIDASHPDLNVKGGASFISGEPNALVDTNGHGTHVAGTVAALNNNIGVVGVAYNADLYAVKVLSASGSGTLSGIAQGVEWAIANNMDVINMSLGGSSGSTALKQAVDNAYASGIVVVAAAGNSGTRGRQNTMGYPARYSSVIAVGAVDSNNNRASFSSVGAELEVMAPGVSVLSTVPGGGYASYNGTSMASPHVAGAAALIKAKYPSLSASQIRDRLRNTATYLGDPFYYGNGVINVERALQ

SEQ ID NO: 68366 - protein, 275 aa, Bacillus subtilis
AQTTPWGITHINAHKAHSSSVTGSGVKVAVLDTGIDASHPDLNVKGGASFISGEPNALVDTNGHGTHVAGTVAALDNTIGVVGVAYNADLYAVKVLSASGSGTLSGIAQGVEWAIANNMDVINMSLGGSSGSTALKQAVDNAYASGIVVVAAAGNSGTRGRQNTMGYPARYSSVIAVGAVDSNNQRASFSSVGAELEVMAPGVSVLSTVPGGGYASYSGTSMASPHVAGAAALIKAKYPSLSASQIRDRLRNTATYLGDPFYYGNGVINVERALQ

SEQ ID NO: 68367 - protein, 275 aa, Bacillus subtilis
AQTTPWGIEHINAHKAHSSSVTGSGVKVAVLDTGIDASHPDLNVKGGASFISGEPNALVDTNGHGTHVSGTVAALDNTIGVVGVAYNADLYAVKVLSASGSGTLSGIAQGVEWAIANNMDVINMSLGGSSGSTALKQAVDNAYASGIVVVAAAGNSGTRGRQNTMQYPARYSSVIAVGAVDSNNNRASFSSVGAELEVMAPGVSVLSTVPGGGYASYNGTSMASPHVAGAAALIKAKYPSLSASQIRDRLRNTATYLGDPFYYGNGVINVERALQ

SEQ ID NO: 68368 - protein, 275 aa, Bacillus subtilis
AQVTPWGITHINAHKAHSSSVTGSGVKVAVLDTGIDASHPDLNVKGGASFISGEPNALVDTNGHGTHVAGTVAALDNTIGVVGVAYNADLYAVKVLSASGSGTLSGIAQGVEWAIANNMDVINMSLGGSSGSTALKQAVDNAYASGIVVVAAAGNSGTRGRQNTMQYPARYSSVIAVGAVDSNNNRASFSSVGAELEVMAPGVSVLSTVPGGGYASYNGTSMASPHVAGAAALIKAKYPSLSASQIRDRLRNTATYLGDPFYYGNGVINVERALQ

SEQ ID NO: 68369 - protein, 275 aa, Bacillus subtilis
AQVTPWGITHINAHKAHSSSVTGSGVKVAVLDTGIDASHEDLNVKGGASFISGEPNALVDTNGHGTHVAGTVAALDNTIGVVGVAYNADLYAVKVLSASGSGTLSGIAQGVEWAIANNMDVINMSLGGSSGSTALKQAVDNAYASGIVVVAAAGNSGTRGRQNTMGYPARYSSVIAVGAVDSNNNRASFSSVGAELEVMAPGVSVLSTVPGGGYASYNGTSMASPHVAGAAALIKAKYPSLSASQIRDRLRNTATYLGDPFYYGNGVINVERALQ

SEQ ID NO: 68370 - protein, 275 aa, Bacillus subtilis
AQTTPWGITHINAHKAHSSSVTGSGVKVAVLDTGIDASHPDLNVKGGASFISGEPNALVDTNGHGTHVAGTVAALDNNIGVVGVAYNADLYAVKVLSASGSGTLSGIAQGVEWAIANNMDVINMSLGGSSGSTALKQAVDNAYASGIVVVAAAGNSGTRGRQNTMGYPARYSSVIAVGAVDSNNNRASFSSVGAELEVMAPGVSVLSTVPGGGYASYSGTSMASPHVAGAAALIKAKYPSLSASQIRDRLRNTATYLGPPFYYGNGVINVERALQ

SEQ ID NO: 68371 - protein, 275 aa, Bacillus subtilis
AQTTPWGITHINAHKAHSSSVTGSGVKVAVLDTGIDASHPDLNVKGGASFISGEPNALVDTNGHGTHVSGTVAALDNTIGVVGVAYNADLYAVKVLSASGSGTLSGIAQGVEWAIANNMDVINMSLGGSSGSTALKQAVDNAYASGIVVVAAAGNSGTRGRQNTMGYPARYSSVIAVGAVDSNNNRASFSSVGAELEVMAPGVSVLSTVPGGGYASYSGTSMASPHVAGAAALIKAKYPSLSASQIRDRLRNTATYLGDPFYYGNGVINVERALQ

SEQ ID NO: 68372 - protein, 275 aa, Bacillus subtilis
AQTTPWGITHINAHKAHSSSVTGSGVKVAVLDTGIDASHPDLNVKGGASFISGEPNALVDTNGHGTHVSGTVAALDNTIGVVGVAYNADLYAVKVLSASGSGTLSGIAQGVEWAIANNMDVINMSLGGSSGSTALKQAVDNAYASGIVVVAAAGNSGTRGRQNTMQYPARYSSVIAVGAVDSNNNRASFSSVGAELEVMAPGVSVLSTVPGGGYASYNGTSMASPHVAGAAALIKAKYPSLSASQIRDRLRNTATYLGDPFYYGNGVINVERALQ

SEQ ID NO: 68373 - protein, 275 aa, Bacillus subtilis
AQTTPWGITHINAHKAHSSSVTGSGVKVAVLDTGIDASHPDLNVKGGASFISGEPNALVDTNGHGTHVAGTVAALDNNIGVVGVAYNADLYAVKVLSASGSGTLSGIAQGVEWAIANNMDVINMSLGGSSGSTALKQAVDNAYASGIVVVAAAGNSGTRGRQNTMQYPARYSSVIAVGAVDSNNNRASFSSVGAELEVMAPGVSVLSTVPGGGYASYNGTSMASPHVAGAAALIKAKYPSLSASQIRDRLRNTATYLGDPFYYGNGVINVERALQ

SEQ ID NO: 68374 - protein, 275 aa, Bacillus subtilis
AQTTPWGIEHINAHKAHSSSVTGSGVKVAVLDTGIDASHPDLNVKGGASFISGEPNALVDTNGHGTHVAGTVAALNNNIGVVGVAYNADLYAVKVLSASGSGTLSGIAQGVEWAIANNMDVINMSLGGSSGSTALKQAVDNAYASGIVVVAAAGNSGTRGRQNTMGYPARYSSVIAVGAVDSNNNRASFSSVGAELEVMAPGVSVLSTVPGGGYASYNGTSMASPHVAGAAALIKAKYPSLSASQIRDRLRNTATYLGPPFYYGNGVINVERALQ

SEQ ID NO: 68375 - protein, 275 aa, Bacillus subtilis
AQVTPWGITHINAHKAHSSSVTGSGVKVAVLDTGIDASHPDLNVKGGASFISGEPNALVDTNGHGTHVAGTVAALNNTIGVVGVAYNADLYAVKVLSASGSGTLSGIAQGVEWAIANNMDVINMSLGGSSGSTALKQAVDNAYASGIVVVAAAGNSGTRGRQNTMGYPARYSSVIAVGAVDSNNNRASFSSVGAELEVMAPGVSVLSTVPGGGYASYNGTSMASPHVAGAAALIKAKYPSLSASQIRDRLRNTATYLGDPFYYGNGVINVERALQ

SEQ ID NO: 68376 - protein, 275 aa, Bacillus subtilis
AQTTPWGITHINAHKAHSSSVTGSGVKVAVLDTGIDASHPDLNVKGGASFISGEPNALVDTNGHGTHVAGTVAALDNNIGVVGVAYNADLYAVKVLSASGSGTLSGIAQGVEWAIANNMDVINMSLGGSSGSTALKQAVDNAYASGIVVVAAAGNSGTRGRQNTMQYPARYSSVIAVGAVDSNNNRASFSSVGAELEVMAPGVSVLSTVPGGGYASYNGTSMASPHVAGAAALIKAKYPSLSASQIRDRLRNTATYLGPPFYYGNGVINVERALQ

SEQ ID NO: 68377 - protein, 275 aa, Bacillus subtilis
AQTTPWGITHINAHKAHSSSVTGSGVKVAVLDTGIDASHEDLNVKGGASFISGEPNALVDTNGHGTHVAGTVAALDNTIGVVGVAYNADLYAVKVLSASGSGTLSGIAQGVEWAIANNMDVINMSLGGSSGSTALKQAVDNAYASGIVVVAAAGNSGTRGRQNTMQYPARYSSVIAVGAVDSNNNRASFSSVGAELEVMAPGVSVLSTVPGGGYASYNGTSMASPHVAGAAALIKAKYPSLSASQIRDRLRNTATYLGPPFYYGNGVINVERALQ

SEQ ID NO: 68378 - protein, 275 aa, Bacillus subtilis
AQTTPWGITHINAHKAHSSSVTGSGVKVAVLDTGIDASHPDLNVKGGASFISGEPNALVDTNGHGTHVAGTVAALNNNIGVVGVAYNADLYAVKVLSASGSGTLSGIAQGVEWAIANNMDVINMSLGGPSGSTALKQAVDNAYASGIVVVAAAGNSGTRGRQNTMGYPARYSSVIAVGAVDSNNNRASFSSVGAELEVMAPGVSVLSTVPGGGYASYNGTSMASPHVAGAAALIKAKYPSLSASQIRDRLRNTATYLGDPFYYGNGVINVERALQ

SEQ ID NO: 68379 - protein, 275 aa, Bacillus subtilis
AQTTPWGITHINAHKAHSSSVTGSGVKVAVLDTGIDASHPDLNVKGGASFISGEPNALVDTNGHGTHVAGTVAALNNTIGVVGVAYNADLYAVKVLSASGSGTLSGIAQGVEWAIANNMDVINMSLGGPSGSTALKQAVDNAYASGIVVVAAAGNSGTRGRQNTMGYPARYSSVIAVGAVDSNNNRASFSSVGAELEVMAPGVSVLSTVPGGGYASYSGTSMASPHVAGAAALIKAKYPSLSASQIRDRLRNTATYLGDPFYYGNGVINVERALQ

SEQ ID NO: 68380 - protein, 275 aa, Bacillus subtilis
AQVTPWGITHINAHKAHSSSVTGSGVKVAVLDTGIDASHPDLNVKGGASFISGEPNALVDTNGHGTHVAGTVAALDNTIGVVGVAYNADLYAVKVLSASGSGTLSGIAQGVEWAIANNMDVINMSLGGSSGSTALKQAVDNAYASGIVVVAAAGNSGTRGRQNTMGYPARYSSVIAVGAVDSNNNRASFSSVGAELEVMAPGVSVLSTVPGGGYASYSGTSMASPHVAGAAALIKAKYPSLSASQIRDRLRNTATYLGDPFYYGNGVINVERALQ

SEQ ID NO: 68381 - protein, 275 aa, Bacillus subtilis
AQVTPWGITHINAHKAHSSSVTGSGVKVAVLDTGIDASHPDLNVKGGASFISGEPNALVDTNGHGTHVAGTVAALDNNIGVVGVAYNADLYAVKVLSASGSGTLSGIAQGVEWAIANNMDVINMSLGGSSGSTALKQAVDNAYASGIVVVAAAGNSGTRGRQNTMGYPARYSSVIAVGAVDSNNNRASFSSVGAELEVMAPGVSVLSTVPGGGYASYNGTSMASPHVAGAAALIKAKYPSLSASQIRDRLRNTATYLGDPFYYGNGVINVERALQ

SEQ ID NO: 68382 - protein, 275 aa, Bacillus subtilis
AQTTPWGITHINAHKAHSSSVTGSGVKVAVLDTGIDASHPDLNVKGGASFISGEPNALVDTNGHGTHVSGTVAALNNTIGVVGVAYNADLYAVKVLSASGSGTLSGIAQGVEWAIANNMDVINMSLGGSSGSTALKQAVDNAYASGIVVVAAAGNSGTRGRQNTMGYPARYSSVIAVGAVDSNNNRASFSSVGAELEVMAPGVSVLSTVPGGGYASYNGTSMASPHVAGAAALIKAKYPSLSASQIRDRLRNTATYLGDPFYYGNGVINVERALQ

SEQ ID NO: 68383 - protein, 275 aa, Bacillus subtilis
AQTTPWGITHINAHKAHSSSVTGSGVKVAVLDTGIDASHPDLNVKGGASFISGEPNALVDTNGHGTHVAGTVAALNNTIGVVGVAYNADLYAVKVLSASGSGTLSGIAQGVEWAIANNMDVINMSLGGSSGSTALKQAVDNAYASGIVVVAAAGNSGTRGRQNTMGYPARYSSVIAVGAVDSNNNRASFSSVGAELEVMAPGVSVLSTVPGGGYASYSGTSMASPHVAGAAALIKAKYPSLSASQIRDRLRNTATYLGDPFYYGNGVINVERALQ

SEQ ID NO: 68384 - protein, 275 aa, Bacillus subtilis
AQTTPWGIEHINAHKAHSSSVTGSGVKVAVLDTGIDASHPDLNVKGGASFISGEPNALVDTNGHGTHVAGTVAALNNTIGVVGVAYNADLYAVKVLSASGSGTLSGIAQGVEWAIANNMDVINMSLGGSSGSTALKQAVDNAYASGIVVVAAAGNSGTRGRQNTMGYPARYSSVIAVGAVDSNNQRASFSSVGAELEVMAPGVSVLSTVPGGGYASYNGTSMASPHVAGAAALIKAKYPSLSASQIRDRLRNTATYLGDPFYYGNGVINVERALQ

SEQ ID NO: 68385 - protein, 275 aa, Bacillus subtilis
AQVTPWGITHINAHKAHSSSVTGSGVKVAVLDTGIDASHPDLNVKGGASFISGEPNALVDTNGHGTHVSGTVAALDNTIGVVGVAYNADLYAVKVLSASGSGTLSGIAQGVEWAIANNMDVINMSLGGSSGSTALKQAVDNAYASGIVVVAAAGNSGTRGRQNTMGYPARYSSVIAVGAVDSNNNRASFSSVGAELEVMAPGVSVLSTVPGGGYASYNGTSMASPHVAGAAALIKAKYPSLSASQIRDRLRNTATYLGDPFYYGNGVINVERALQ

SEQ ID NO: 68386 - protein, 275 aa, Bacillus subtilis
AQTTPWGITHINAHKAHSSSVTGSGVKVAVLDTGIDASHPDLNVKGGASFISGEPNALVDTNGHGTHVAGTVAALDNNIGVVGVAYNADLYAVKVLSASGSGTLSGIAQGVEWAIANNMDVINMSLGGSSGSTALKQAVDNAYASGIVVVAAAGNSGTRGRQNTMGYPARYSSVIAVGAVDSNNNRASFSSVGAELEVMAPGVSVLSTVPGGGYASYSGTSMASPHVAGAAALIKAKYPSLSASQIRDRLRNTATYLGDPFYYGNGVINVERALQ

SEQ ID NO: 68387 - protein, 275 aa, Bacillus subtilis
AQTTPWGIEHINAHKAHSSSVTGSGVKVAVLDTGIDASHPDLNVKGGASFISGEPNALVDTNGHGTHVSGTVAALNNTIGVVGVAYNADLYAVKVLSASGSGTLSGIAQGVEWAIANNMDVINMSLGGSSGSTALKQAVDNAYASGIVVVAAAGNSGTRGRQNTMGYPARYSSVIAVGAVDSNNNRASFSSVGAELEVMAPGVSVLSTVPGGGYASYNGTSMASPHVAGAAALIKAKYPSLSASQIRDRLRNTATYLGPPFYYGNGVINVERALQ

SEQ ID NO: 68388 - protein, 275 aa, Bacillus subtilis
AQVTPWGITHINAHKAHSSSVTGSGVKVAVLDTGIDASHPDLNVKGGASFISGEPNALVDTNGHGTHVAGTVAALNNTIGVVGVAYNADLYAVKVLSASGSGTLSGIAQGVEWAIANNMDVINMSLGGPSGSTALKQAVDNAYASGIVVVAAAGNSGTRGRQNTMGYPARYSSVIAVGAVDSNNNRASFSSVGAELEVMAPGVSVLSTVPGGGYASYNGTSMASPHVAGAAALIKAKYPSLSASQIRDRLRNTATYLGDPFYYGNGVINVERALQ

SEQ ID NO: 68389 - protein, 275 aa, Bacillus subtilis
AQTTPWGITHINAHKAHSSSVTGSGVKVAVLDTGIDASHPDLNVKGGASFISGEPNALVDTNGHGTHVAGTVAALNNTIGVVGVAYNADLYAVKVLSASGSGTLSGIAQGVEWAIANNMDVINMSLGGSSGSTALKQAVDNAYASGIVVVAAAGNSGTRGRQNTMGYPARYSSVIAVGAVDSNNQRASFSSVGAELEVMAPGVSVLSTVPGGGYASYNGTSMASPHVAGAAALIKAKYPSLSASQIRDRLRNTATYLGDPFYYGNGVINVERALQ

SEQ ID NO: 68390 - protein, 275 aa, Bacillus subtilis
AQTTPWGITHINAHKAHSSSVTGSGVKVAVLDTGIDASHPDLNVKGGASFISGEPNALVDTNGHGTHVAGTVAALNNNIGVVGVAYNADLYAVKVLSASGSGTLSGIAQGVEWAIANNMDVINMSLGGSSGSTALKQAVDNAYASGIVVVAAAGNSGTRGRQNTMGYPARYSSVIAVGAVDSNNNRASFSSVGAELEVMAPGVSVLSTVPGGGYASYNGTSMASPHVAGAAALIKAKYPSLSASQIRDRLRNTATYLGPPFYYGNGVINVERALQ

SEQ ID NO: 68391 - protein, 275 aa, Bacillus subtilis
AQTTPWGITHINAHKAHSSSVTGSGVKVAVLDTGIDASHPDLNVKGGASFISGEPNALVDTNGHGTHVAGTVAALNNTIGVVGVAYNADLYAVKVLSASGSGTLSGIAQGVEWAIANNMDVINMSLGGPSGSTALKQAVDNAYASGIVVVAAAGNSGTRGRQNTMQYPARYSSVIAVGAVDSNNNRASFSSVGAELEVMAPGVSVLSTVPGGGYASYNGTSMASPHVAGAAALIKAKYPSLSASQIRDRLRNTATYLGDPFYYGNGVINVERALQ

SEQ ID NO: 68392 - protein, 275 aa, Bacillus subtilis
AQTTPWGITHINAHKAHSSSVTGSGVKVAVLDTGIDASHPDLNVKGGASFISGEPNALVDTNGHGTHVAGTVAALNNTIGVVGVAYNADLYAVKVLSASGSGTLSGIAQGVEWAIANNMDVINMSLGGSSGSTALKQAVDNAYASGIVVVAAAGNSGTRGRQNTMGYPARYSSVIAVGAVDSNNNRASFSSVGAELEVMAPGVSVLSTVPGGGYASYSGTSMASPHVAGAAALIKAKYPSLSASQIRDRLRNTATYLGPPFYYGNGVINVERALQ

SEQ ID NO: 68393 - protein, 275 aa, Bacillus subtilis
AQTTPWGIEHINAHKAHSSSVTGSGVKVAVLDTGIDASHEDLNVKGGASFISGEPNALVDTNGHGTHVAGTVAALDNNIGVVGVAYNADLYAVKVLSASGSGTLSGIAQGVEWAIANNMDVINMSLGGSSGSTALKQAVDNAYASGIVVVAAAGNSGTRGRQNTMGYPARYSSVIAVGAVDSNNNRASFSSVGAELEVMAPGVSVLSTVPGGGYASYNGTSMASPHVAGAAALIKAKYPSLSASQIRDRLRNTATYLGDPFYYGNGVINVERALQ

SEQ ID NO: 68394 - protein, 275 aa, Bacillus subtilis
AQTTPWGIEHINAHKAHSSSVTGSGVKVAVLDTGIDASHPDLNVKGGASFISGEPNALVDTNGHGTHVAGTVAALNNTIGVVGVAYNADLYAVKVLSASGSGTLSGIAQGVEWAIANNMDVINMSLGGSSGSTALKQAVDNAYASGIVVVAAAGNSGTRGRQNTMQYPARYSSVIAVGAVDSNNNRASFSSVGAELEVMAPGVSVLSTVPGGGYASYNGTSMASPHVAGAAALIKAKYPSLSASQIRDRLRNTATYLGDPFYYGNGVINVERALQ

SEQ ID NO: 68395 - protein, 275 aa, Bacillus subtilis
AQTTPWGIEHINAHKAHSSSVTGSGVKVAVLDTGIDASHPDLNVKGGASFISGEPNALVDTNGHGTHVSGTVAALDNTIGVVGVAYNADLYAVKVLSASGSGTLSGIAQGVEWAIANNMDVINMSLGGSSGSTALKQAVDNAYASGIVVVAAAGNSGTRGRQNTMGYPARYSSVIAVGAVDSNNQRASFSSVGAELEVMAPGVSVLSTVPGGGYASYNGTSMASPHVAGAAALIKAKYPSLSASQIRDRLRNTATYLGDPFYYGNGVINVERALQ

SEQ ID NO: 68396 - protein, 275 aa, Bacillus subtilis
AQVTPWGITHINAHKAHSSSVTGSGVKVAVLDTGIDASHPDLNVKGGASFISGEPNALVDTNGHGTHVAGTVAALNNTIGVVGVAYNADLYAVKVLSASGSGTLSGIAQGVEWAIANNMDVINMSLGGSSGSTALKQAVDNAYASGIVVVAAAGNSGTRGRQNTMGYPARYSSVIAVGAVDSNNNRASFSSVGAELEVMAPGVSVLSTVPGGGYASYNGTSMASPHVAGAAALIKAKYPSLSASQIRDRLRNTATYLGPPFYYGNGVINVERALQ

SEQ ID NO: 68397 - protein, 275 aa, Bacillus subtilis
AQVTPWGITHINAHKAHSSSVTGSGVKVAVLDTGIDASHPDLNVKGGASFISGEPNALVDTNGHGTHVAGTVAALDNNIGVVGVAYNADLYAVKVLSASGSGTLSGIAQGVEWAIANNMDVINMSLGGSSGSTALKQAVDNAYASGIVVVAAAGNSGTRGRQNTMGYPARYSSVIAVGAVDSNNNRASFSSVGAELEVMAPGVSVLSTVPGGGYASYNGTSMASPHVAGAAALIKAKYPSLSASQIRDRLRNTATYLGPPFYYGNGVINVERALQ

SEQ ID NO: 68398 - protein, 275 aa, Bacillus subtilis
AQVTPWGITHINAHKAHSSSVTGSGVKVAVLDTGIDASHPDLNVKGGASFISGEPNALVDTNGHGTHVAGTVAALDNTIGVVGVAYNADLYAVKVLSASGSGTLSGIAQGVEWAIANNMDVINMSLGGSSGSTALKQAVDNAYASGIVVVAAAGNSGTRGRQNTMGYPARYSSVIAVGAVDSNNQRASFSSVGAELEVMAPGVSVLSTVPGGGYASYNGTSMASPHVAGAAALIKAKYPSLSASQIRDRLRNTATYLGDPFYYGNGVINVERALQ

SEQ ID NO: 68399 - protein, 275 aa, Bacillus subtilis
AQTTPWGIEHINAHKAHSSSVTGSGVKVAVLDTGIDASHPDLNVKGGASFISGEPNALVDTNGHGTHVSGTVAALNNTIGVVGVAYNADLYAVKVLSASGSGTLSGIAQGVEWAIANNMDVINMSLGGSSGSTALKQAVDNAYASGIVVVAAAGNSGTRGRQNTMGYPARYSSVIAVGAVDSNNNRASFSSVGAELEVMAPGVSVLSTVPGGGYASYNGTSMASPHVAGAAALIKAKYPSLSASQIRDRLRNTATYLGDPFYYGNGVINVERALQ

SEQ ID NO: 68400 - protein, 275 aa, Bacillus subtilis
AQTTPWGITHINAHKAHSSSVTGSGVKVAVLDTGIDASHPDLNVKGGASFISGEPNALVDTNGHGTHVAGTVAALNNTIGVVGVAYNADLYAVKVLSASGSGTLSGIAQGVEWAIANNMDVINMSLGGSSGSTALKQAVDNAYASGIVVVAAAGNSGTRGRQNTMGYPARYSSVIAVGAVDENNNRASFSSVGAELEVMAPGVSVLSTVPGGGYASYNGTSMASPHVAGAAALIKAKYPSLSASQIRDRLRNTATYLGDPFYYGNGVINVERALQ

SEQ ID NO: 68401 - protein, 275 aa, Bacillus subtilis
AQTTPWGITHINAHKAHSSSVTGSGVKVAVLDTGIDASHPDLNVKGGASFISGEPNALVDTNGHGTHVAGTVAALNNTIGVVGVAYNADLYAVKVLSASGSGTLSGIAQGVEWAIANNMDVINMSLGSSSGSTALKQAVDNAYASGIVVVAAAGNSGTRGRQNTMGYPARYSSVIAVGAVDSNNNRASFSSVGAELEVMAPGVSVLSTVPGGGYASYNGTSMASPHVAGAAALIKAKYPSLSASQIRDRLRNTATYLGPPFYYGNGVINVERALQ

SEQ ID NO: 68402 - protein, 275 aa, Bacillus subtilis
AQTTPWGITHINAHKAHSSSVTGSGVKVAVLDTGIDASHEDLNVKGGASFISGEPNALVDTNGHGTHVAGTVAALDNNIGVVGVAYNADLYAVKVLSASGSGTLSGIAQGVEWAIANNMDVINMSLGGSSGSTALKQAVDNAYASGIVVVAAAGNSGTRGRQNTMGYPARYSSVIAVGAVDSNNNRASFSSVGAELEVMAPGVSVLSTVPGGGYASYNGTSMASPHVAGAAALIKAKYPSLSASQIRDRLRNTATYLGDPFYYGNGVINVERALQ

SEQ ID NO: 68403 - protein, 275 aa, Bacillus subtilis
AQTTPWGITHINAHKAHSSSVTGSGVKVAVLDTGIDASHEDLNVKGGASFISGEPNALVDTNGHGTHVAGTVAALNNTIGVVGVAYNADLYAVKVLSASGSGTLSGIAQGVEWAIANNMDVINMSLGGSSGSTALKQAVDNAYASGIVVVAAAGNSGTRGRQNTMGYPARYSSVIAVGAVDSNNNRASFSSVGAELEVMAPGVSVLSTVPGGGYASYNGTSMASPHVAGAAALIKAKYPSLSASQIRDRLRNTATYLGDPFYYGNGVINVERALQ

SEQ ID NO: 68404 - protein, 275 aa, Bacillus subtilis
AQTTPWGITHINAHKAHSSSVTGSGVKVAVLDTGIDASHPDLNVKGGASFISGEPNALVDTNGHGTHVAGTVAALNNTIGVVGVAYNADLYAVKVLSASGSGTLSGIAQGVEWAIANNMDVINMSLGGSSGSTALKQAVDNAYASGIVVVAAAGNSGTRGRQNTMGYPARYSSVIAVGAVDSNNQRASFSSVGAELEVMAPGVSVLSTVPGGGYASYNGTSMASPHVAGAAALIKAKYPSLSASQIRDRLRNTATYLGPPFYYGNGVINVERALQ

SEQ ID NO: 68405 - protein, 275 aa, Bacillus subtilis
AQTTPWGITHINAHKAHSSSVTGSGVKVAVLDTGIDASHPDLNVKGGASFISGEPNALVDTNGHGTHVSGTVAALDNTIGVVGVAYNADLYAVKVLSASGSGTLSGIAQGVEWAIANNMDVINMSLGGSSGSTALKQAVDNAYASGIVVVAAAGNSGTRGRQNTMGYPARYSSVIAVGAVDSNNQRASFSSVGAELEVMAPGVSVLSTVPGGGYASYNGTSMASPHVAGAAALIKAKYPSLSASQIRDRLRNTATYLGDPFYYGNGVINVERALQ

SEQ ID NO: 68406 - protein, 275 aa, Bacillus subtilis
AQTTPWGIEHINAHKAHSSSVTGSGVKVAVLDTGIDASHPDLNVKGGASFISGEPNALVDTNGHGTHVAGTVAALDNTIGVVGVAYNADLYAVKVLSASGSGTLSGIAQGVEWAIANNMDVINMSLGGSSGSTALKQAVDNAYASGIVVVAAAGNSGTRGRQNTMQYPARYSSVIAVGAVDSNNNRASFSSVGAELEVMAPGVSVLSTVPGGGYASYSGTSMASPHVAGAAALIKAKYPSLSASQIRDRLRNTATYLGDPFYYGNGVINVERALQ

SEQ ID NO: 68407 - protein, 275 aa, Bacillus subtilis
AQTTPWGIEHINAHKAHSSSVTGSGVKVAVLDTGIDASHPDLNVKGGASFISGEPNALVDTNGHGTHVAGTVAALNNTIGVVGVAYNADLYAVKVLSASGSGTLSGIAQGVEWAIANNMDVINMSLGGSSGSTALKQAVDNAYASGIVVVAAAGNSGTRGRQNTMGYPARYSSVIAVGAVDSNNQRASFSSVGAELEVMAPGVSVLSTVPGGGYASYNGTSMASPHVAGAAALIKAKYPSLSASQIRDRLRNTATYLGPPFYYGNGVINVERALQ

SEQ ID NO: 68408 - protein, 275 aa, Bacillus subtilis
AQTTPWGITHINAHKAHSSSVTGSGVKVAVLDTGIDASHPDLNVKGGASFISGEPNALVDTNGHGTHVSGTVAALDNNIGVVGVAYNADLYAVKVLSASGSGTLSGIAQGVEWAIANNMDVINMSLGGSSGSTALKQAVDNAYASGIVVVAAAGNSGTRGRQNTMGYPARYSSVIAVGAVDSNNNRASFSSVGAELEVMAPGVSVLSTVPGGGYASYNGTSMASPHVAGAAALIKAKYPSLSASQIRDRLRNTATYLGPPFYYGNGVINVERALQ

SEQ ID NO: 68409 - protein, 275 aa, Bacillus subtilis
AQTTPWGITHINAHKAHSSSVTGSGVKVAVLDTGIDASHEDLNVKGGASFISGEPNALVDTNGHGTHVAGTVAALDNTIGVVGVAYNADLYAVKVLSASGSGTLSGIAQGVEWAIANNMDVINMSLGGSSGSTALKQAVDNAYASGIVVVAAAGNSGTRGRQNTMGYPARYSSVIAVGAVDSNNQRASFSSVGAELEVMAPGVSVLSTVPGGGYASYNGTSMASPHVAGAAALIKAKYPSLSASQIRDRLRNTATYLGDPFYYGNGVINVERALQ

SEQ ID NO: 68410 - protein, 275 aa, Bacillus subtilis
AQTTPWGIEHINAHKAHSSSVTGSGVKVAVLDTGIDASHEDLNVKGGASFISGEPNALVDTNGHGTHVAGTVAALNNTIGVVGVAYNADLYAVKVLSASGSGTLSGIAQGVEWAIANNMDVINMSLGGSSGSTALKQAVDNAYASGIVVVAAAGNSGTRGRQNTMGYPARYSSVIAVGAVDSNNNRASFSSVGAELEVMAPGVSVLSTVPGGGYASYNGTSMASPHVAGAAALIKAKYPSLSASQIRDRLRNTATYLGPPFYYGNGVINVERALQ

SEQ ID NO: 68411 - protein, 275 aa, Bacillus subtilis
AQTTPWGITHINAHKAHSSSVTGSGVKVAVLDTGIDASHPDLNVKGGASFISGEPNALVDTNGHGTHVAGTVAALNNTIGVVGVAYNADLYAVKVLSASGSGTLSGIAQGVEWAIANNMDVINMSLGGSSGSTALKQAVDNAYASGIVVVAAAGNSGTRGRQNTMQYPARYSSVIAVGAVDSNNNRASFSSVGAELEVMAPGVSVLSTVPGGGYASYNGTSMASPHVAGAAALIKAKYPSLSASQIRDRLRNTATYLGDPFYYGNGVINVERALQ

SEQ ID NO: 68412 - protein, 275 aa, Bacillus subtilis
AQTTPWGITHINAHKAHSSSVTGSGVKVAVLDTGIDASHPDLNVKGGASFISGEPNALVDTNGHGTHVAGTVAALDNTIGVVGVAYNADLYAVKVLSASGSGTLSGIAQGVEWAIANNMDVINMSLGGSSGSTALKQAVDNAYASGIVVVAAAGNSGTRGRQNTMQYPARYSSVIAVGAVDSNNNRASFSSVGAELEVMAPGVSVLSTVPGGGYASYSGTSMASPHVAGAAALIKAKYPSLSASQIRDRLRNTATYLGDPFYYGNGVINVERALQ

SEQ ID NO: 68413 - protein, 275 aa, Bacillus subtilis
AQTTPWGIEHINAHKAHSSSVTGSGVKVAVLDTGIDASHPDLNVKGGASFISGEPNALVDTNGHGTHVAGTVAALNNNIGVVGVAYNADLYAVKVLSASGSGTLSGIAQGVEWAIANNMDVINMSLGGSSGSTALKQAVDNAYASGIVVVAAAGNSGTRGRQNTMGYPARYSSVIAVGAVDSNNNRASFSSVGAELEVMAPGVSVLSTVPGGGYASYNGTSMASPHVAGAAALIKAKYPSLSASQIRDRLRNTATYLGDPFYYGNGVINVERALQ

SEQ ID NO: 68414 - protein, 275 aa, Bacillus subtilis
AQVTPWGIEHINAHKAHSSSVTGSGVKVAVLDTGIDASHPDLNVKGGASFISGEPNALVDTNGHGTHVAGTVAALNNTIGVVGVAYNADLYAVKVLSASGSGTLSGIAQGVEWAIANNMDVINMSLGGSSGSTALKQAVDNAYASGIVVVAAAGNSGTRGRQNTMGYPARYSSVIAVGAVDSNNNRASFSSVGAELEVMAPGVSVLSTVPGGGYASYNGTSMASPHVAGAAALIKAKYPSLSASQIRDRLRNTATYLGDPFYYGNGVINVERALQ

SEQ ID NO: 68415 - protein, 275 aa, Bacillus subtilis
AQTTPWGITHINAHKAHSSSVTGSGVKVAVLDTGIDASHPDLNVKGGASFISGEPNALVDTNGHGTHVSGTVAALNNTIGVVGVAYNADLYAVKVLSASGSGTLSGIAQGVEWAIANNMDVINMSLGGPSGSTALKQAVDNAYASGIVVVAAAGNSGTRGRQNTMGYPARYSSVIAVGAVDSNNNRASFSSVGAELEVMAPGVSVLSTVPGGGYASYNGTSMASPHVAGAAALIKAKYPSLSASQIRDRLRNTATYLGDPFYYGNGVINVERALQ

SEQ ID NO: 68416 - protein, 274 aa, Bacillus pumilus
AQTVPYGIPQIKAPAVHAQGYKGANVKIAVLDTGIHAAHPDLNVAGGASFVPSEPNATQDFQSHGTHVAGTIAALDNTIGVLGVAPSASLYAVKVLDRNGDGQYSWLLSGIEWAVANNMDVINMSLGGPNGSTALKNAVDTANNRGVVVVAAAGNSGSTGSTSTVGYPAKYDSTIAVANVNSSNVRNSSSSAGPELDVSAPGTSILSTVPSSGYTSYTGTSMASPHVAGAAALILSKNPNLSNSQVRQRLENTATPLGNSFYYGKGLINAQAAS

SEQ ID NO: 68417 - protein, 274 aa, Bacillus pumilus
AQTAPYGITQIKAPAVHAQGYKGANVKVAVLDTGIHAAHPDLNVAGGASFVPSEPNATQDFQSHGTHVAGTIAALDNTIGVLGVAPSASLYAVKVLDRNGDGQYSWIISGIEWAVANNMDVINMSLGGPDGSAALKNAVDTANKRGVVVVAAAGNSGSTGSTSTVGYPAKYDSTIAVANVNSSNVRNSSSSAGPELDVSAPGTSILSTVPSSGYTSYTGTSMASPHVAGAAALILSKNPNLSNSQVRQRLETTATPLGNSFYYGKGLINAEAAS

SEQ ID NO: 68418 - protein, 274 aa, Bacillus pumilus
AQTVPYGIPQIKAPAVHAQGYKGANVKVAVLDTGIHAAHPDLNVAGGASFVPSEPNATQDFQSHGTHVAGTIAALDNTIGVLGVASSASLYAVKVLDRNGDGQYSWIISGIEWAVANNMDVINMSLGGPNGSTALKNAVDTANNRGVVVVAAAGNSGSTGSTSTVGYPAKYDSTIAVANVNSSNVRNSSSSAGPELDVSAPGTSILSTVPSSGYTSYTGTSMASPHVAGAAALILAKNPNLSNSQVRQRLENTATPLGNSFYYGKGLINAQAAS

SEQ ID NO: 68419 - protein, 274 aa, Bacillus pumilus
AQTVPYGITQIKAPAVHAQGYKGANVKVAVLDTGIHAAHPDLNVAGGASFVPSEPNATQDFQSHGTHVAGTIAALDNTIGVLGVAPSASLYAVKVLDRNGDGQYSWIISGIEWAVANNMDVINMSLGGPDGSAALKNAVDTANKRGVVVVAAAGNSGSTGSESTVGYPAKYDSTIAVANVNSSNVRNSSSSAGPELDVSAPGTSILSTVPSSGYTSYTGTSMASPHVAGAAALILSKNPNLSNSQVRQRLETTATPLGNSFYYGKGLINAEAAS

SEQ ID NO: 68420 - protein, 274 aa, Bacillus pumilus
AQTVPYGITQIKAPAVHAQGYKGANVKVAVLDTGIHAAHPDLNVAGGASFVPSEPNATQDFQSHGTHVAGTIAALDNTIGVLGVAPSASLYAVKVLDRNGDGQYSWIISGIEWAVANNMDVINMSLGGPHNSTALKNAVDTANKRGVVVVAAAGNSGSTGSTSTVGYPAKYDSTIAVANVNSSNVRNSSSSAGPELDVSAPGTSILSTVPSSGYTCYTGTSMAAPHVAGAAALILSKNPNLSNSQVRQRLENTATPLGNSFYYGKGLINAEAAS

SEQ ID NO: 68421 - protein, 274 aa, Bacillus pumilus
AQTVPYGIPQIKAPAVHAQGYKGANVKVAVLDTGIHAAHPDLNVAGGASFVPSEPNATQDFQSHGTHVAGTIAALDNTIGVLGVAPSASLYAVKVLDRNGDGQYSWLLSGIEWAVANNMDVINMSLGGPNGSTALKNAVDTANNRGVVVVAAAGNSGSTGSTSTVGYPAKYDSTIAVANVNSSNVRNSSSSAGPELDVSAPGTSILSTVPSSGYTSYTGTSMASPHVAGAAALILSKNPSLSNSQVRQRLENTATPLGNSFYYGKGLINAQAAS

SEQ ID NO: 68422 - protein, 274 aa, Bacillus pumilus
AQTVPYGIPQIKAPAVHAQGYKGANVKVAVLDTGIHAAHPDLNVAGGASFVPSEPNATQDFQSHGTHVAGTIAALDNTIGVLGIAPSASLYAVKVLDRNGDGQYSWLLSGIEWAVANNMDVINMSLGGPNGSTALKNAVDTANNRGVVVVAAAGNSGSTGSTSTVGYPAKYDSTIAVANVNSSNVRNSSSSAGPELDVSAPGTSILSTVPSSGYTSYTGTSMASPHVAGAAALILSKNPNLSNSQVRQRLENTATPLGNSFYYGKGLINAQAAS

SEQ ID NO: 68423 - protein, 274 aa, Bacillus pumilus
AQTVPYGIPQIKAPAVHAQGYKGANVKVAVLDTGIHAAHPDLNVAGGASFVPSEPNATQDFQSHGTHVAGTIAALDNTIGVLGVAPSAALYAVKVLDRNGDGQYSWIISGIEWAVANNMDVINMSLGGPNHSTALKNAVDTANNRGVVVVAAAGNSGSTGSTSTVGYPAKYDSTIAVANVNSSNVRNSSSSAGPELDVSAPGTSILSTVPSSGYTSYTGTSMASPHVAGAAALILSKNPNLSNSQVRQRLENTATPLGNSFYYGKGLINAQAAS

SEQ ID NO: 68424 - protein, 274 aa, Bacillus pumilus
AQTVPYGIPQIKAPAVHAQGYKGANVKVAVLDTGIHAAHPDLNVAGGASFVPSEPNATQDFQSHGTHVAGTIAALDNTIGVVGVAPSASLYAVKVLDRNGDGQYSWLLSGIEWAVANNMDVINMSLGGPNGSTALKNAVDTANNRGVVVVAAAGNSGSTGSTSTVGYPAKYDSTIAVANVNSSNVRNSSSSAGPELDVSAPGTSILSTVPSSGYTSYTGTSMASPHVAGAAALILSKNPNLSNSQVRQRLENTATPLGNSFYYGKGLINAQAAS

SEQ ID NO: 68425 - protein, 274 aa, Bacillus pumilus
AQTVPYGITQIKAPAVHAQGYKGANVKVAVLDTGIHAAHPDLNVAGGASFVPSEPNATQDFQSHGTHVAGTIAALDNTIGVLGVAPSASLYAVKVLDRNGDGQYSWIISGIEWAVANNMDVINMSLGGPDGSAALKNAVDTANKRGVVVVAAAGNSGSTGSTSTVMYPAKYDSTIAVANVNSSNVRNSTSSAGPELDVSAPGTSILSTVPSSGYTSMTGTSMASPHVAGAAALILSKNPNLSNSQVRQRLETTATPLGNSFYYGKGLINAEAAS

SEQ ID NO: 68426 - protein, 274 aa, Bacillus pumilus
AQTVPYGIPQIKAPAVHAQGYKGANVKVAVLDTGIHAAHPDLNVAGGASFVPSEPNATQDFQSHGTHVAGTIAALDNTIGVLGVAPSASLYAVKVLDRNGDGQYSWIISGIEWAVANNMDVINMSLGGPNHSTALKNAVDTANNRGVVVVAAAGNSGSTGSTSTVMYPAKYDSTIAVANVNSSNVRNSSSSAGPELDVSAPGTSILSTVPSSGYTSYTGTSMASPHVAGAAALILSKNPNLSNSQVRQRLENTATPLGNSFYYGKGLINAQAAS

SEQ ID NO: 68427 - protein, 274 aa, Bacillus pumilus
AQRVPYGITQIKAPAVHAQGYKGANVKVAVLDTGIHAAHPDLNVAGGASFVPSEPNATQDFQSHGTHVAGTIAALDNTIGVLGVAPSASLYAVKVLDRNGDGQYSWIISGIEWAVANNMDVINMSLGGPDGSAALKNAVDTANKRGVVVVAAAGNSGSTGSTSTVGYPAKYDSTIAVANVNSSNVRNSSSSAGPELDVSAPGTSILSTVPSSGYTSYTGTSMASPHVAGAAALILSKNPNLSNSQVRQRLETTATPLGNSFYYGKGLINAEAAS

SEQ ID NO: 68428 - protein, 274 aa, Bacillus pumilus
AQTVPYGIPQIKAPAVHAQGYKGANVKVAVLDTGIHAAHPDLNVAGGASFVPSEPNATQDFQSHGTHVAGTIAALDNTIGVLGVAPTASLYAVKVLDRNGDGQYSWLLSGIEWAVANNMDVINMSLGGPNGSTALKNAVDTANNRGVVVVAAAGNSGSTGSTSTVGYPAKYDSTIAVANVNSSNVRNSSSSAGPELDVSAPGTSILSTVPSSGYTSYTGTSMASPHVAGAAALILSKNPNLSNSQVRQRLENTATPLGNSFYYGKGLINAQAAS

SEQ ID NO: 68429 - protein, 274 aa, Bacillus pumilus
AQTVPYGITQIKAPAVHAQGYKGANVKVAVLDTGIHAAHPDLNVAGGASFVPSEPNATQDFQSHGTHVAGTIAALDNTIGVLGVAPSASLYAVKVLDRNGDGQYSWIISGIEWAVANNMDVINMSLGGPDGSAALKNAVDTANKRGVVVVAAAGNSGSTGSTSTVMYPAKYDSTIAVANVNSSNVRNSSSSAGPELDVSAPGTSILSTVPSSGYTSMTGTSMASPHVAGAAALILSKNPNLSNSQVRQRLETTATPLGNSFYYGKGLINAEAAS

SEQ ID NO: 68430 - protein, 274 aa, Bacillus pumilus
AQTVPYGIPQIKAPAVHAQGYKGANVKVGVLDTGIHAAHPDLNVAGGASFVPSEPNATQDFQSHGTHVAGTIAALDNTIGVLGVAPSASLYAVKVLDRNGDGQYSWLLSGIEWAVANNMDVINMSLGGPNGSTALKNAVDTANNRGVVVVAAAGNSGSTGSTSTVGYPAKYDSTIAVANVNSSNVRNSSSSAGPELDVSAPGTSILSTVPSSGYTSYTGTSMASPHVAGAAALILSKNPNLSNSQVRQRLENTATPLGNSFYYGKGLINAQAAS

SEQ ID NO: 68431 - protein, 274 aa, Bacillus pumilus
AQTVPYGIHQIKAPAVHAQGYKGANVKVAVLDTGIHAAHPDLNVAGGASFVPSEPNATQDFESHGTHVAGTIAALDNTIGVFGVAPSASLYAVKVLDRNGDGQYSWIISGIEWAVANNMDVINMSLGGPNGSTALKNAVDTANNRGVVVVAAAGNSGSTGSTSTVGYPAKYDSTIAVANVNSSNVRNSSSSAGPELDVSAPGTSILSTVPSSGYTSYTGTSMASPHVAGAAALILSKNPNLSNSQVRQRLENTATPLGNSFYYGKGLINAQAAS

SEQ ID NO: 68432 - protein, 274 aa, Bacillus pumilus
AQTVPYGITQIKAPAVHAQGYKGANVKVAVLDTGIHAAHPDLNVAGGASFVPSEPNATQDFQSHGTHVAGTIAALDNTIGVLGVAPSASLYAVKVLDRNGDGQYSWIISGIEWAVANNMDVINMSLGGPDGSAALKNAVDTANKRGVVVVAAAGNSGSTGSTSTVGYPAKYDSTIAVANVNSSNVRNSTSSAGPELDVSAPGTSILSTVPSSGYTSMTGTSMAAPHVAGAAALILSKNPNLSNSQVRQRLETTATPLGNSFYYGKGLINAEAAS

SEQ ID NO: 68433 - protein, 274 aa, Bacillus pumilus
AQTVPYGITQIKAPAVHAQGYKGANVKVAVLDTGIHAAHPDLNVAGGASFVPSEPNATQDFQSHGTHVAGTIAALDNTIGVLGVAPSASLYAVKVLDRNGDGQYSWIISGIEWAVANNMDVINMSLGGPDGSAALKNAVDTANKRGVVVVAAAGNSGSTGSGSTVGYPAKYDSTIAVANVNSSNVRNSSSSAGPELDVSAPGTSILSTVPSSGYTSYTGTSMASPHVAGAAALILSKNPNLSNSQVRQRLETTATPLGNSFYYGKGLINAEAAS

SEQ ID NO: 68434 - protein, 274 aa, Bacillus pumilus
AQTVPYGITQIKAPAVHAQGYKGANVKVAVLDTGIHAAHPDLNVAGGASFVPSEPNATQDFQSHGTHVAGTIAALDNTIGVLGVAPSASLYAVKVLDRNGDGQYSWIISGIEWAVANNMDVINMSLGGPNGSRALKNAVDTANNRGVVVVAAAGNSGSTGSTSTVGYPAKYDSTIAVANVNSSNVRNSSSSAGPELDVSAPGTSILSTVPSSGYTCYTGTSMAAPHVAGAAALILSKNPNLSNSQVRQRLENTATPLGNSFYYGKGLINAEAAS

SEQ ID NO: 68435 - protein, 274 aa, Bacillus pumilus
AQTVPYGITQIKAPAVHAQGYKGANVKVAVLDTGIHAAHPDLNVAGGASFVPSEPNATQDFQSHGTHVAGTIAALDNTIGVLGVAPSASLYAVKVLDRNGEGQYSWIISGIEWAVANNMDVINMSLGGPNNSTALKNAVDTANNRGVVVVAAAGNSGSTGSTSTVGYPAKYDSTIAVANVNSSNVRNSSSSAGPELDVSAPGTSILSTVPSSGYTCYTGTSMAAPHVAGAAALILSKNPNLSNSQVRQRLENTATPLGNSFYYGKGLINAEAAS

SEQ ID NO: 68436 - protein, 274 aa, Bacillus pumilus
AQTVPYGIPQIKAPAVHAQGYKGANVKVAVLDTGIHAAHPDLNVAGGASFVPSEPNATQDFQSHGTHVAGTIAALDNTIGVLGVAPSASLYAVKVLDRNGDGQYSWLLSGIEWAVANNMDVINMSLGGPNGSTALKNAVDTANNRGVVVVAAAGNSGSTGSTSTVGYPAKYDSTIAVANVNSSNVRNSSSSAGPELDVSAPGTSILSTVPSSGYTSYTGTSMAAPHVAGAAALILSKNPNLSNSQVRQRLENTATPLGNSFYYGKGLINAQAAS

SEQ ID NO: 68437 - protein, 274 aa, Bacillus pumilus
AQTVPYGITQIKAPAVHAQGYKGANVKVAVLDTGIHAAHPDLNVAGGASFVPSEPNATQDFQSHGTHVAGTIAALDNTIGVLGVAPSASLYAVKVLDRNGDGQYSWIISGIEWAVANNMDVINMSLGGPDGSAALKNAVDTANKHGVVVVAAAGNSGSTGSTSTVGYPAKYDSTIAVANVNSSNVRNSSSSAGPELDVSAPGTSILSTVPSSGYTSYTGTSMASPHVAGAAALILSKNPNLSNSQVRQRLETTATPLGNSFYYGKGLINAEAAS

SEQ ID NO: 68438 - protein, 274 aa, Bacillus pumilus
AQTVPYGIPQIKAPAVHAQGYKGANVKVAVLDTGIHAAHPDLNVAGGVSFVPSEPNATQDFQSHGTHVAGTIAALDNTIGVLGVAPSASLYAVKVLDRNGDGQYSWLLSGIEWAVANNMDVINMSLGGPNGSTALKNAVDTANNRGVVVVAAAGNSGSTGSTSTVGYPAKYDSTIAVANVNSSNVRNSSSSAGPELDVSAPGTSILSTVPSSGYTSYTGTSMASPHVAGAAALILSKNPNLSNSQVRQRLENTATPLGNSFYYGKGLINAQAAS

SEQ ID NO: 68439 - protein, 275 aa, Bacillus sp. LG1
AQTVPWGIPHIKADKAHAAGVTGSGVKVAILDTGIDANHADLNVKGGASFVSGEWNALQDGNGHGTHVAGTVAALNNTTGVLGVAYNADLYAVKVLSASGSGTLSGIAQGIEWSISNGMNVINMSLGGSSGSTALQQACNNAYNRGIVVIAAAGNSGSSGNRNTMGYPARYSSVIAVGAVSSNNTRASFSSVGSELEVMAPGVNILSTTPGNNYASFNGTSMAAPHVAGAAALIKAKYPSMTNVQIRERLKNTATNLGDPFFYGKGVINVESALQ

SEQ ID NO: 68440 - protein, 274 aa, Bacillus pumilus
AQTVPYGITQIKAPAVHVQGYKGANVKVAVLDTGIHAAHPDLNVAGGASFVPSEPNATQDFQSHGTHVAGTIAALDNTIGVLGVAPSASLYAVKVLDRNGDGQYSWIISGIEWAVANNMDVINMSLGGPDGSAALKNAVDTANKRGVVVVAAAGNSGSTGSTSTVGYPAKYDSTIAVANVNSSNVRNSSSSAGPELDVSAPGTSILSTVPSSGYTSYTGTSMASPHVAGAAALILSKNPNLSNSQVRQRLETTATPLGNSFYYGKGLINAEAAS

SEQ ID NO: 68441 - protein, 274 aa, Bacillus pumilus
AQTVPYGITQIKAPAVHAQGYKGANVKVAVLDTGIHAAHPDLNVAGGASFVPSEPNATQDFQSHGTHVAGTIAALDNTIGVLGVAPSASLYAVKVLDRNGDGQYSWIISGIEWAVANNMDVINMSLGGPTHSAALKNAVDTANKRGVVVVAAAGNSGSTGSTSTVGYPAKYDSTIAVANVNSSNVRNSSSSAGPELDVSAPGTSILSTVPSSGYTSYTGTSMASPHVAGAAALILSKNPNLSNSQVRQRLETTATPLGNSFYYGKGLINAEAAS

SEQ ID NO: 68442 - protein, 274 aa, Bacillus pumilus
AQTVPYGITQIKAPAVHAQGYKGANVKVGVLDTGIHAAHPDLNVAGGASFVPSEPNATQDFQSHGTHVAGTIAALDNTIGVLGVAPSASLYAVKVLDRNGDGQYSWLLSGIEWAVANNMDVINMSLGGPNGSTALKNAVDTANNRGVVVVAAAGNSGSTGSTSTVGYPAKYDSTIAVANVNSSNVRNSSSSAGPELDVSAPGTSILSTVPSSGYTCYTGTSMASPHVAGAAALILSKNPNLSNSQVRQRLENTATPLGNSFYYGKGLINAEAAS

SEQ ID NO: 68443 - protein, 274 aa, Bacillus pumilus
AQTVPYGIPQIKAPAVHAQGYKGANVKVAVLDTGIHAAHPDLNVAGGASFVPSEPNATQDFQSHGTHVAGTIAALDNTIGVLGVASSASLYAVKVLDRNGDGQYSWIISGIEWAVANNMDVINMSLGGPNGSTALKNAVDTANNRGVVVVAAAGNSGSTGSTSTVGYPAKYDSTIAVANVNSSNVRHSSSSAGPELDVSAPGTSILSTVPSSGYTSYTGTSMASPHVAGAAALILAKNPNLSNSQVRQRLENTATPLGNSFYYGKGLINAQAAS

SEQ ID NO: 68444 - protein, 274 aa, Bacillus pumilus
AQTVPYGITQIKAPAVHAQGYKGANVKVAVLDTGIHAAHPDLNVAGGASFVPSEPNATQDFQSHGTHVAGTIAALDNTIGVLGVAPSASLYAVKVLDRNGDGQYSWLLSGIEWAVANNMDVINMSLGGPNGSTALKNAVDTANNRGVVVVAAAGNSGSTGSTSTVGYPAKYDSTIAVANVNSSNVRNSSSSAGPELDVSAPGTSILSTVPSSGYTSYTGTSMASPHVAGAAALILSKNPNLSNSQVRQRLENTATPLGNSFYYGKGLINAQAAS

SEQ ID NO: 68445 - protein, 275 aa, Bacillus sp. LG1
AQTVPWGIPHIKADKAHAAGVTGSGVKVAILDTGIDANHADLNVKGGASFVSGEPNVLQDGNGHGTHVAGTVAALNNTTGVLGVAYNADLYAVKVLSASGSGTLSGIAQGIEWSISNGMNVINMSLGGSSGSTALQQACNNAYNRGIVVIAAAGNSGSSGNRNTMGYPARYSSVIAVGAVSSNNTRASFSSVGSELEVMAPGVNILSTTPGNNYASFNGTSMAAPHVAGAAALIKAKYPSMTNVQIRERLKNTATNLGDPFFYGKGVINVESALQ

SEQ ID NO: 68446 - protein, 274 aa, Bacillus pumilus
AQAVPYGITQIKAPAVHAQGYKGANVKVAVLDTGIHAAHPDLNVAGGASFVPSEPNATQDFQSHGTHVAGTIAALDNTIGVLGVAPSASLYAVKVLDRNGDGQYSWIISGIEWAVANNMDVINMSLGGPDGSAALKNAVDTANKRGVVVVAAAGNSGSTGSTSTVGYPAKYDSTIAVANVNSSNVRNSSSSAGPELDVSAPGTSILSTVPSSGYTSYTGTSMASPHVAGAAALILSKNPNLSNSQVRQRLETTATPLGNSFYYGKGLINAEAAS

SEQ ID NO: 68447 - protein, 274 aa, Bacillus pumilus
AQTVPYGIPQIKAPAVHAQGYKGANVKVAVLDTGIHAAHPDLNVAGGASFVPSEPNATQDFQSHGTHVAGTIAALDNTIGVLGVAPSASLYAVKVLDRNGDGQYSWLLSGIEWAVANNMDVINMSLGGPNRSTALKNAVDTANNRGVVVVAAAGNSGSTGSTSTVGYPAKYDSTIAVANVNSSNVRNSSSSAGPELDVSAPGTSILSTVPSSGYTSYTGTSMASPHVAGAAALILSKNPNLSNSQVRQRLENTATPLGNSFYYGKGLINAQAAS

SEQ ID NO: 68448 - protein, 275 aa, Bacillus sp. LG1
AQTVPWGIPHIKADKAHAAGVTGSGVKVAILDTGIDANHADLNVKGGASFVSGEPNALQTGNGHGTHVAGTVAALNNTTGVLGVAYNADLYAVKVLSASGSGTLSGIAQGIEWSISNGMNVINMSLGGSSGSTALQQACNNAYNRGIVVIAAAGNSGSSGNRNTMGYPARYSSVIAVGAVSSNNTRASFSSVGSELEVMAPGVNILSTTPGNNYASFNGTSMAAPHVAGAAALIKAKYPSMTNVQIRERLKNTATNLGDPFFYGKGVINVESALQ

SEQ ID NO: 68449 - protein, 274 aa, Bacillus pumilus
AQTVPYGIPQIKAPAVHAQGYKGANVKVAVLDTGIHAAHPDLNVAGGASFVPSEPNATQDFQSHGTHVAGTIAALDNTIGVLGVAPSAALYAVKVLDRNGDGQYSWIISGIEWAVANNMDVINMSLGGPNGSTALKNAVDTANNRGVVVVAAAGNSGSTGSTSTVGYPAKYDSTIAVANVNSSNVRNSSSSAGPELDVSAPGTSILSTVPSSGYTSYTGTSMAAPHVAGAAALILSKNPNLSNSQVRQRLENTATPLGNSFYYGKGLINAQAAS

SEQ ID NO: 68450 - protein, 274 aa, Bacillus pumilus
AQTVPYGIPQIKAPAVHAQGYKGANVKVAVLDTGIHAAHPDLNVAGGASFVPSEPNATQDFQSHGTHVAGTIAALDNTIGVLGVAPSASLYAVKVLDRNGDGQYSWLLSGIEWAVANNMDVINMSLGGPNGSTALKNAVDTANNRGVVVVAAAGNSGSTGSTSTVGYPAKYDSTIAVANVNSSNVRNSSSSAGPELDVSAPGTSILSTVPSSGYTSYTGTSMASPHVAGAAALILSKNPNLSNSQVRQRLENTATPLGNPFYYGKGLINAQAAS

SEQ ID NO: 68451 - protein, 274 aa, Bacillus pumilus
AQTVPYGITQIKAPAVHAQGYKGANVKVAVLDTGIHAAHPDLNVAGGASFVPSEPNATQDFQSHGTHVAGTIAALDNTIGVLGVAPSASLYAVKVLDRNGDGQYSWIISGIEWAVANNMDVINMSLGGPDGSAALKNAVDTANKRGVVVVAAAGNSGSTGSTSTVMYPAKYDSTIAVANVNSSNVRNSSSSAGPELDVSAPGTSILSTVPNSGYTSMTGTSMASPHVAGAAALILSKNPNLSNSQVRQRLETTATPLGNSFYYGKGLINAEAAS

SEQ ID NO: 68452 - protein, 274 aa, Bacillus pumilus
AQTVPYGIPQIKAPAVHAQGYKGANVKVAVLDTGIHAAHPDLNVAGGASFVPSEPNATQDFQSHGTHVAGTIAALDNTIGVLGVAPSASLYAVKVLDRNGDGQYSWLLSGIEWAVANNMDVINMSLGGPNGSTALKNAVDTANNRGVVVVAAAGNSGSTGSTSTVGYPAKYDSTIAVANVNSSNVRNSSSSAGPELDVSAPGTSILSTVPSSGYTSYTGTSMATPHVAGAAALILSKNPNLSNSQVRQRLENTATPLGNSFYYGKGLINAQAAS

SEQ ID NO: 68453 - protein, 274 aa, Bacillus pumilus
AQTVPYGITQIKAPAVHAQGYKGANVKVAVLDTGIHAAHPDLNVAGGASFVPSEPNATQDFQSHGTHVAGTIAALDNTIGVLGVAPSASLYAVKVLDRNGDGQYSWLLSGIEWAVANNMDVINMSLGGPNGSTALKNAVDTANNRGVVVVAAAGNSGSTGSTSTVGYPAKYDSTIAVANVNSSNVRNSSSSAGPELDVSAPGTSILSTVPSSGYTCYTGTSMATPHVAGAAALILSKNPNLSNSQVRQRLENTATPLGNSFYYGKGLINAEAAS

SEQ ID NO: 68454 - protein, 274 aa, Bacillus pumilus
AQTVPYGIPQIKAPAVHAQGYKGANVKVAVLDTGIHAAHPDLNVAGGASFVPSEPNATQDFQSHGTHVAGTIAALDNTIGVLGVAPSASLYAVKVLDRNGDGQYSWIISGIEWAVANNMDVINMSLGGPNGSTALKNAVDTANNRGVVVVAAAGNSGSTGSTSTVMYPAKYDSTIAVANVNSSNVRNSTSSAGPELDVSAPGTSILSTVPSSGYTSYTGTSMAAPHVAGAAALILSKNPNLSNSQVRQRLENTATPLGNSFYYGKGLINAQAAS

SEQ ID NO: 68455 - protein, 274 aa, Bacillus pumilus
AQTVPYGIPQIKAPAVHAQGYKGANVKVAVLDTGIHAAHPDLNVAGGASFVPSEPNATQDFQSHGTHVAGTIAALDNSIGVLGVAPSASLYAVKVLDRNGDGQYSWLLSGIEWAVANNMDVINMSLGGPNGSTALKNAVDTANNRGVVVVAAAGNSGSTGSTSTVGYPAKYDSTIAVANVNSSNVRNSSSSAGPELDVSAPGTSILSTVPSSGYTSYTGTSMASPHVAGAAALILSKNPNLSNSQVRQRLENTATPLGNSFYYGKGLINAQAAS

SEQ ID NO: 68456 - protein, 274 aa, Bacillus pumilus
AQTVPYGIPQIKAPAVHAQGYKGANVKVAVLDTGIHAAHPDLNVAGGASFVPSEPNATQDFQSHGTHVAGTIAALDNTIGVLGVAPSASLYAVKVLDRNGDGQYSWLLSGIEWAVANNMDVINMSLGGPNGSRALKNAVDTANNRGVVVVAAAGNSGSTGSTSTVGYPAKYDSTIAVANVNSSNVRNSSSSAGPELDVSAPGTSILSTVPSSGYTSYTGTSMASPHVAGAAALILSKNPNLSNSQVRQRLENTATPLGNSFYYGKGLINAQAAS

SEQ ID NO: 68457 - protein, 274 aa, Bacillus pumilus
AQTVPYGITQIKAPAVHAQGYKGANVKVAVLDTGIHAAHPDLNVAGGASFVPSEPNATQDFQSHGTHVAGTIAALDNTIGVLGVAPSAALYAVKVLDRNGDGQYSWIISGIEWAVANNMDVINMSLGGPDGSAALKNAVDTANKRGVVVVAAAGNSGSTGSTSTVGYPAKYDSTIAVANVNSSNVRNSSSSAGPELDVSAPGTSILSTVPSSGYTSYTGTSMASPHVAGAAALILSKNPNLSNSQVRQRLETTATPLGNSFYYGKGLINAEAAS

SEQ ID NO: 68458 - protein, 274 aa, Bacillus pumilus
AQTVPYGITQIKAPAVHAQGYKGANVKVAVLDTGIHAAHPDLNVAGGASFVPSEPNATQDFQSHGTHVAGTIAALDNTIGVLGVAPSASLYAVKVLDRNGDGQYSWIISGIEWAVANNMDVINMSLGGPDGSAALKNAVDTANKRGVVVVAAAGNSGSTGSTSTVGYPAKYDSTIAVANVNSSNVRNSSSSAGPELDVSAPGTSILSTVPSSGYTSYTGTSMASPHVAGAAALILSKNPNLSNSQVRQRLETTATPLGNSFYYGAGLINAEAAS

SEQ ID NO: 68459 - protein, 274 aa, Bacillus pumilus
AQTVPYGIPQIKAPAVHAQGYKGANVKVAVLDTGIHAAHPDLNVAGGASFVPSEPNATQDFQSHGTHVAGTIAALDNTIGVLGVAPSASLYAVKVLDRNGDGQYSWLLSGIEWAVANNMDVINMSLGGPNGSTALKNAVDTANNRGVVVVAAAGNSGSTGSTSTVSYPAKYDSTIAVANVNSSNVRNSSSSAGPELDVSAPGTSILSTVPSSGYTSYTGTSMASPHVAGAAALILSKNPNLSNSQVRQRLENTATPLGNSFYYGKGLINAQAAS

SEQ ID NO: 68460 - protein, 274 aa, Bacillus pumilus
AQTVPYGIPQIKAPAVHAQGYRGANVKVAVLDTGIHAAHPDLNVAGGASFVPSEPNATQDFQSHGTHVAGTIAALDNTIGVLGVAPSASLYAVKVLDRNGDGQYSWLLSGIEWAVANNMDVINMSLGGPNGSTALKNAVDTANNRGVVVVAAAGNSGSTGSTSTVGYPAKYDSTIAVANVNSSNVRNSSSSAGPELDVSAPGTSILSTVPSSGYTSYTGTSMASPHVAGAAALILSKNPNLSNSQVRQRLENTATPLGNSFYYGKGLINAQAAS

SEQ ID NO: 68461 - protein, 274 aa, Bacillus pumilus
AQTVPYGITQIKAPAVHAQGYKGANVKVAVLDTGIHAAHPDLNVAGGASFVPSEPNATQDFQSHGTHVAGTIAALDNTIGVLGVAPSASLYAVKVLDRNGDGQYSWIISGIEWAVANNMDVINMSLGGPTDSAALKNAVDTANKRGVVVVAAAGNSGSTGSTSTVGYPAKYDSTIAVANVNSSNVRNSSSSAGPELDVSAPGTSILSTVPSSGYTSYTGTSMASPHVAGAAALILSKNPNLSNSQVRQRLETTATPLGNSFYYGKGLINAEAAS

SEQ ID NO: 68462 - protein, 274 aa, Bacillus pumilus
AQTVPYGITQIKAPAVHAQGYKGANVKVAVLDTGIHAAHPDLNVAGGASFVPSEPNATQDFQSHGTHVAGTIAALDNTIGVLGVAPSASLYAVKVLDRNGDGQYSWIISGIEWAVANNMDVINMSLGGPDGSRALKNAVDTANKRGVVVVAAAGNSGSTGSTSTVGYPAKYDSTIAVANVNSSNVRNSSSSAGPELDVSAPGTSILSTVPSSGYTSYTGTSMAAPHVAGAAALILSKNPNLSNSQVRQRLETTATPLGNSFYYGKGLINAEAAS

SEQ ID NO: 68463 - protein, 274 aa, Bacillus pumilus
AQTVPYGIPQIKAPAVHAQGYKGANVKVAVLDTGIHAAHPDLNVAGGASFVPSEPNATQDFQSHGTHVAGTIAALDNTIGVLGVAPSASLYAVKVLDRNGDGQYSWIISGIEWAVANNMDVINMSLGGPNHSTALKNAVDTANNRGVVVVAAAGNSGSTGSTSTVGYPAKYDSTIAVANVNSSNVRNSSSSAGPELDVSAPGTSILSTVPSSGYTSYTGTSMAAPHVAGAAALILSKNPNLSNSQVRQRLENTATPLGNSFYYGKGLINAQAAS

SEQ ID NO: 68464 - protein, 274 aa, Bacillus pumilus
AQTVPYGIPQIKAPAVHAQGYKGANVKVAVLDTGIHAAHPDLNVAGGASFVPSEPNATQDFQSHGTHVAGTIAALDNTIGVLGVAPSAALYAVKVLDRNGDGQYSWIISGIEWAVANNMDVINMSLGGPNHSTALKNAVDTANNRGVVVVAAAGNSGSTGSTSTVGYPAKYDSTIAVANVNSSNVRNSTSSAGPELDVSAPGTSILSTVPSSGYTSYTGTSMASPHVAGAAALILSKNPNLSNSQVRQRLENTATPLGNSFYYGKGLINAQAAS

SEQ ID NO: 68465 - protein, 274 aa, Bacillus pumilus
AQTVPYGITQIKAPAVHAQGYKGANVKVAVLDTGIHAAHPDLNVAGGASFVPSEPNATQDFQSHGTHVAGTIAALDNTIGVFGVAPSASLYAVKVLDRNGDGQYSWIISGIEWAVANNMDVINMSLGGPDGSAALKNAVDTANKRGVVVVAAAGNSGSTGSTSTVGYPAKYDSTIAVANVNSSNVRNSSSSAGPELDVSAPGTSILSTVPSSGYTSYTGTSMASPHVAGAAALILSKNPNLSNSQVRQRLETTATPLGNSFYYGKGLINAEAAS

SEQ ID NO: 68466 - protein, 274 aa, Bacillus pumilus
AQTVPYGITQIKAPAVHAQGYKGANVKVAVLDTGIHAAHPDLNVAGGASFVPSEPNATQDFQSHGTHVAGTIAALDNTIGVLGVAPSASLYAVKVLDRNGDGQYSWIISGIEWAVANNMDVINMSLGGPDGSAALKNAVDTANKRGVVVVAAAGNSGSTGSSSTVGYPAKYDSTIAVANVNSSNVRNSSSSAGPELDVSAPGTSILSTVPSSGYTSYTGTSMASPHVAGAAALILSKNPNLSNSQVRQRLETTATPLGNSFYYGKGLINAEAAS

SEQ ID NO: 68467 - protein, 274 aa, Bacillus pumilus
AQTVPYGITQIKAPAVHAQGYRGANVKVAVLDTGIHAAHPDLNVAGGASFVPSEPNATQDFQSHGTHVAGTIAALDNTIGVLGVAPSASLYAVKVLDRNGDGQYSWIISGIEWAVANNMDVINMSLGGPNGSTALKNAVDTANNRGVVVVAAAGNSGSTGSTSTVGYPAKYDSTIAVANVNSSNVRNSSSSAGPELDVSAPGTSILSTVPSSGYTCYTGTSMASPHVAGAAALILSKNPSLSNSQVRQRLENTATPLGNSFYYGKGLINAEAAS

SEQ ID NO: 68468 - protein, 274 aa, Bacillus pumilus
AQTVPYGITQIKAPAVHAQGYKGANVKVAVLDTGIHAAHPDLNVAGGASFVPSEPNATQDFQSHGTHVAGTIAALDNTIGVLGVAPSASLYAVKVLDRNGDGQYSWIISGIEWAVANNMDVINMSLGGPDGSAALKNAVDTANKRGVVVVAAAGNSGSTGSSSTVGYPAKYDSTIAVANVNSSNVRNSSSSAGPELDVSAPGTSILSTVPSSGYTSMTGTSMASPHVAGAAALILSKNPNLSNSQVRQRLETTATPLGNSFYYGKGLINAEAAS

SEQ ID NO: 68469 - protein, 274 aa, Bacillus pumilus
AQTVPWGIPQIKAPAVHAQGYKGANVKVAVLDTGIHAAHPDLNVAGGASFVPSEPNATQDFQSHGTHVAGTIAALDNTIGVLGVAPSASLYAVKVLDRNGDGQYSWIISGIEWAVANNMDVINMSLGGPNGSTALKNAVDTANNRGVVVVAAAGNSGSTGSTSTVGYPAKYDSTIAVANVNSSNVRNSTSSAGPELDVSAPGTSILSTVPSSGYTSYTGTSMAAPHVAGAAALILSKNPNLSNSQVRQRLENTATPLGNSFYYGKGLINAQAAS

SEQ ID NO: 68470 - protein, 274 aa, Bacillus pumilus
AQTVPYGITQIKAPAVHAQGYKGANVKVAVLDTGIHAAHPDLNVAGGASFVPSEPNATQDFQSHGTHVAGTIAALDNTIGVLGVAPSASLYAVKVLDRNGDGQYSWIISGIEWAVANNMDVINMSLGGPVHSAALKNAVDTANKRGVVVVAAAGNSGSTGSTSTVGYPAKYDSTIAVANVNSSNVRNSSSSAGPELDVSAPGTSILSTVPSSGYTSMTGTSMASPHVAGAAALILSKNPNLSNSQVRQRLETTATPLGNSFYYGKGLINAEAAS

SEQ ID NO: 68471 - protein, 274 aa, Bacillus pumilus
AQTVPYGITQIKAPAVHAQGYKGANVKVAVLDTGIHAAHPDLNVAGGASFVPSEPNATQDFQSHGTHVAGTIAALDNTIGVLGVAPTASLYAVKVLDRNGDGQYSWLLSGIEWAVANNMDVINMSLGGPNGSTALKNAVDTANNRGVVVVAAAGNSGSTGSTSTVGYPAKYDSTIAVANVNSSNVRNSSSSAGPELDVSAPGTSILSTVPSSGYTCYTGTSMASPHVAGAAALILSKNPNLSNSQVRQRLENTATPLGNSFYYGKGLINAEAAS

SEQ ID NO: 68472 - protein, 274 aa, Bacillus pumilus
AQTVPYGIPQIKAPAVHAQGYKGANVKVAVLDTGIHAAHPDLNVAGGASFVPSEPNATQDFQSHGTHVAGTIAALDNTIGVLGVAPSAALYAVKVLDRNGDGQYSWIISGIEWAVANNMDVINMSLGGPNGSTALKNAVDTANNRGVVVVAAAGNSGSTGSTSTVGYPAKYDSTIAVANVNSSNVRNSTSSAGPELDVSAPGTSILSTVPSSGYTSYTGTSMAAPHVAGAAALILSKNPNLSNSQVRQRLENTATPLGNSFYYGKGLINAQAAS

SEQ ID NO: 68473 - protein, 274 aa, Bacillus pumilus
AQTVPYGIPQIKAPAVHAQGYKGANVKVAVLDTGIHAAHPDLNVAGGASFVPSEPNATQDFQSHGTHVAGTIAALDNTIGVLGVAPSAALYAVKVLDRNGDGQYSWIISGIEWAVANNMDVINMSLGGPNGSTALKNAVDTANNRGVVVVAAAGNSGSTGSTSTVMYPAKYDSTIAVANVNSSNVRNSSSSAGPELDVSAPGTSILSTVPSSGYTSYTGTSMASPHVAGAAALILSKNPNLSNSQVRQRLENTATPLGNSFYYGKGLINAQAAS

SEQ ID NO: 68474 - protein, 274 aa, Bacillus pumilus
AQTVPYGIPQIKAPAVHAQGYKGANVKVAVLDTGIHAAHPDLNVAGGASFVPSEPNATQDFQSHGTHVAGTIAALDNTIGVLGVAPSASLYAVKVLDRNGDGQYSWLLSGIEWAVANNMDVINMSLGGPNSSTALKNAVDTANNRGVVVVAAAGNSGSTGSTSTVGYPAKYDSTIAVANVNSSNVRNSSSSAGPELDVSAPGTSILSTVPSSGYTSYTGTSMASPHVAGAAALILSKNPNLSNSQVRQRLENTATPLGNSFYYGKGLINAQAAS

SEQ ID NO: 68475 - protein, 274 aa, Bacillus pumilus
AQTVPYGITQIKAPAVHAQGYKGANVKVAVLDTGIHAAHPDLNVAGGASFVPSEPNATQDFQSHGTHVAGTIAALDNTIGVLGVAPSASLYAVKVLDRNGDGQYSWIISGIEWAVANNMDVINMSLGGPDGSAALKNAVDTANKRGVVVVAAAGNSGSTGSTSTVGYPAKYESTIAVANVNSSNVRNSSSSAGPELDVSAPGTSILSTVPSSGYTSYTGTSMASPHVAGAAALILSKNPNLSNSQVRQRLETTATPLGNSFYYGKGLINAEAAS

SEQ ID NO: 68476 - protein, 274 aa, Bacillus pumilus
AQTVPYGITQIKAPAVHAQGYKGANVKVAVLDTGIHAAHPDLNVAGGASFVPSEPNATQDFQSHGTHVAGTIAALDNTIGVLGVAPSASLYAVKVLDRNGDGQYSWIISGIEWAVANNMDVINMSLGGPDGSAALKNAVDTANKRGIVVVAAAGNSGSTGSTSTVGYPAKYDSTIAVANVNSSNVRNSSSSAGPELDVSAPGTSILSTVPSSGYTSYTGTSMASPHVAGAAALILSKNPNLSNSQVRQRLETTATPLGNSFYYGKGLINAEAAS

SEQ ID NO: 68477 - protein, 274 aa, Bacillus pumilus
AQTVPYGITQIKAPAVHAQGYKGANVKVAVLDTGIHAAHPDLNVAGGASFVPSEPNATQDFQSHGTHVAGTIAALDNTIGVLGVAPSASLYAVKVLDRNGDGQYSWIISGIEWAVANNMDVINMSLGGPNSSTALKNAVDTANKRGVVVVAAAGNSGSTGSTSTVGYPAKYDSTIAVANVNSSNVRNSSSSAGPELDVSAPGTSILSTVPSSGYTCYTGTSMATPHVAGAAALILSKNPNLSNSQVRQRLENTATPLGNSFYYGKGLINAEAAS

SEQ ID NO: 68478 - protein, 274 aa, Bacillus pumilus
AQTVPYGITQIKAPAVHAQGYKGANVKVAVLDTGIHAAHPDLNVAGGVSFVPSEPNATQDFQSHGTHVAGTIAALDNTIGVLGVAPSASLYAVKVLDRNGDGQYSWIISGIEWAVANNMDVINMSLGGPNGSTALKNAVDTANNRGVVVVAAAGNSGSTGSTSTVGYPAKYDSTIAVANVNSSNVRNSSSSAGPELDVSAPGTSILSTVPSSGYTCYTGTSMASPHVAGAAALILSKNPNLSNSQVRQRLENTATPLGNPFYYGKGLINAEAAS

SEQ ID NO: 68479 - protein, 269 aa, Synthetic construct
AQVIPWGIERIGTPAAHASGFTGSGVSVAVLDTGIDPHSDLNVQGGVSFVPGESGADDGNGHGTHVAGTIAALDNDEGVLGVAPEVDLFAVKVLSASGSGSISSIAQGLEWTAENNIDVANLSLGSPSPSQTLEQAVNDATDSGVLVVAAAGNSGTSSLGYPARYDNAMAVGATDQSDQLASFSQYGEGLDLVAPGVGVESTYPGGGYDSLSGTSMAAPHVAGAAALVKQKNPGWTNEQIRSHLNDTANDLGDSFRFGSGLLNAENAVQ

SEQ ID NO: 68480 - protein, 269 aa, Synthetic construct
AQVIPWGIERIGTPAAHASGFTGSGVSVAVLDTGIDPHSDLNVQGGVSFVPGESGADDGNGHGTHVAGTIAALDNDEGVLGVAPEVDLFAVKVLSASGSGSISSIAQGLEWTAENNIDVANLSLGSPSPSQTLEQAVNDATDSGVLVVAAAGNSGTSSLGYPARYDNAMAVGATDQSDSLASFSQYGEGLDLVAPGVGVESTYPGGGYDSLSGTSMAAPHVAGAAALVKQKNPGWTNEQIRSHLNDTANDLGDSFRFGSGLLNAENAVQ

SEQ ID NO: 68481 - protein, 269 aa, Synthetic construct
AQVIPWGIERIGTPAAHASGFTGSGVSVAVLDTGIDPHEDLNVQGGVSFVPGESGADDGNGHGTHVAGTIAALDNDEGVLGVAPEVDLFAVKVLSASGSGSISSIAQGLEWTAENNIDVANLSLGSPSPSQTLEQAVNDATDSGVLVVAAAGNSGTSSLGYPARYDNAMAVGATDQSDSLASFSQYGEGLDLVAPGVGVESTYPGGGYDSLSGTSMAAPHVAGAAALVKQKNPGWTNEQIRSHLNDTANDLGDSFRFGSGLLNAENAVQ

SEQ ID NO: 68482 - protein, 269 aa, Synthetic construct
AQSIPWGIERIGTPAAHASGFTGSGVSVAVLDTGIDPHSDLNVQGGVSFVPGESGADDGNGHGTHVAGTIAALDNDEGVLGVAPEVDLFAVKVLSASGSGSISSIAQGLEWTAENNIDVANLSLGSPSPSQTLEQAVNDATDSGVLVVAAAGNSGTSSLGYPARYDNAMAVGATDQSDSLASFSQYGEGLDLVAPGVGVESTYIGGGYDSLSGTSMAAPHVAGAAALVKQKNPGWTNEQIRSHLNDTANDLGDSFRFGSGLLNAENAVQ

SEQ ID NO: 68483 - protein, 269 aa, Synthetic construct
AQVIPWGIERIGTPAAHASGFTGSGVSVAVLDTGIDPHSDLNVQGGVSFVPGESGADDGNGHGTHVAGTIAALDNDEGVLGVAPEVDLFAVKVLSASGSGSISSIAQGLEWTAENNIDVANLSLGSPSPSQTLEQAVNDATDSGVLVVAAAGNSGTSSLQYPARYDNAMAVGATDQSDSLASFSQYGEGLDLVAPGVGVESTYPGGGYDSLSGTSMAAPHVAGAAALVKQKNPGWTNEQIRSHLNDTANDLGDSFRFGSGLLNAENAVQ

SEQ ID NO: 68484 - protein, 272 aa, Bacillus sp.
AQTVPWGIPHIKADKAHAAGVTGSGVKVAILDTGIDANHADLNVKGGASFVSGEPQDGNGHGTHVAGTVAALNNTTGVLGVAYNADLYAVKVLSASGSGTLSGIAQGIEWSISNGMNVINMSLGGSSGSTALQQACNNAYNRGIVVIAAAGNSGSSGNRNTMGYPARYSSVIAVGAVSSNNTRASFSSVGSELEVMAPGVNILSTTPGNNYASFNGTSMAAPHVAGAAALIKAKYPSMTNVQIRERLKNTATNLGDPFFYGKGVINVESALQ

SEQ ID NO: 68485 - protein, 275 aa, Bacillus subtilis
AQTTPWGITHINAHKAHSSSVTGSGVKVAVLDTGIDASHPDLNVKGGASFISGEPNALVDTNGHGTHVSGTVAALNNNIGVVGVAYNADLYAVKVLSASGSGTLSGIAQGVEWAIANNMDVINMSLGGSSGSTALKQAVDNAYASGIVVVAAAGNSGTRGRQNTMGYPARYSSVIAVGAVDSNNNRASFSSVGAELEVMAPGVSVLSTVPGGGYASYNGTSMASPHVAGAAALIKAKYPSLSASQIRDRLRNTATYLGDPFYYGNGVINVERALQ

SEQ ID NO: 68486 - protein, 275 aa, Bacillus subtilis
AQTTPWGITHINAHKAHSSSVTGSGVKVAVLDTGIDASHPDLNVKGGASFISGEPNALVDTNGHGTHVSGTVAALNNTIGVVGVAYNADLYAVKVLSASGSGTLSGIAQGVEWAIANNMDVINMSLGGSSGSTALKQAVDNAYASGIVVVAAAGNSGTRGRQNTMQYPARYSSVIAVGAVDSNNNRASFSSVGAELEVMAPGVSVLSTVPGGGYASYNGTSMASPHVAGAAALIKAKYPSLSASQIRDRLRNTATYLGDPFYYGNGVINVERALQ

SEQ ID NO: 68487 - protein, 275 aa, Bacillus sp. LG1
AQTVPWGIPHIKADKAHAAGVTGSGVKVAILDTGIDANHADLNVKGGASFVSGEANALQDGNGHGTHVAGTVAALNNTTGVLGVAYNADLYAVKVLSASGSGTLSGIAQGIEWSISNGMNVINMSLGGSSGSTALQQACNNAYNRGIVVIAAAGNSGSSGNRNTMGYPARYSSVIAVGAVSSNNTRASFSSVGSELEVMAPGVNILSTTPGNNYASFNGTSMAAPHVAGAAALIKAKYPSMTNVQIRERLKNTATNLGDPFFYGKGVINVESALQ

SEQ ID NO: 68488 - protein, 275 aa, Bacillus subtilis
AQTTPWGIEHINAHKAHSSSVTGSGVKVAVLDTGIDASHEDLNVKGGASFISGEPNALVDTNGHGTHVAGTVAALNNTIGVVGVAYNADLYAVKVLSASGSGTLSGIAQGVEWAIANNMDVINMSLGGSSGSTALKQAVDNAYASGIVVVAAAGNSGTRGRQNTMQYPARYSSVIAVGAVDSNNNRASFSSVGAELEVMAPGVSVLSTVPGGGYASYNGTSMASPHVAGAAALIKAKYPSLSASQIRDRLRNTATYLGDPFYYGNGVINVERALQ

SEQ ID NO: 68489 - protein, 275 aa, Bacillus sp. LG1
AQTVPWGIPHIKADKAHAAGVTGSGVKVAILDTGIDANHADLNVKGGASFVSGEPNALQDGNGHGTHVAGTVAALNNTTGVLGVAYNADLYAVKVLSASGSGTLSGIAQGIEWSISNGMNVINMSLGGSSGSTALQQACDNAYNRGIVVIAAAGNSGSSGNRNTMGYPARYSSVIAVGAVSSNNTRASFSSVGSELEVMAPGVNILSTTPGNNYASFNGTSMAAPHVAGAAALIKAKYPSMTNVQIRERLKNTATNLGDPFFYGKGVINVESALQ

SEQ ID NO: 68490 - protein, 275 aa, Bacillus subtilis
AQTTPWGITHINAHKAHSSSVTGSGVKVAVLDTGIDASHPDLNVKGGASFISGEPNALVDTNGHGTHVSGTVAALNNTIGVVGVAYNADLYAVKVLSASGSGTLSGIAQGVEWAIANNMDVINMSLGGSSGSTALKQAVDNAYASGIVVVAAAGNSGTRGRQNTMGYPARYSSVIAVGAVDSNNNRASFSSVGAELEVMAPGVSVLSTVPGGGYASYSGTSMASPHVAGAAALIKAKYPSLSASQIRDRLRNTATYLGDPFYYGNGVINVERALQ

SEQ ID NO: 68491 - protein, 275 aa, Bacillus subtilis
AQTTPWGITHINAHKAHSSSVTGSGVKVAVLDTGIDASHPDLNVKGGASFISGEPNALVDTNGHGTHVAGTVAALNNTIGVVGVAYNADLYAVKVLSASGSGTLSGIAQGVEWAIANNMDVINMSLGGSSGSTALKQAVDNAYASGIVVVAAAGNSGTRGRQNTMQYPARYSSVIAVGAVDSNNNRASFSSVGAELEVMAPGVSVLSTVPGGGYASYSGTSMASPHVAGAAALIKAKYPSLSASQIRDRLRNTATYLGDPFYYGNGVINVERALQ

SEQ ID NO: 68492 - protein, 275 aa, Bacillus subtilis
AQVTPWGITHINAHKAHSSSVTGSGVKVAVLDTGIDASHPDLNVKGGASFISGEPNALVDTNGHGTHVAGTVAALNNTIGVVGVAYNADLYAVKVLSASGSGTLSGIAQGVEWAIANNMDVINISLGGSSGSTALKQAVDNAYASGIVVVAAAGNSGTRGRQNTMGYPARYSSVIAVGAVDSNNNRASFSSVGAELEVMAPGVSVLSTVPGGGYASYNGTSMASPHVAGAAALIKAKYPSLSASQIRDRLRNTATYLGDPFYYGNGVINVERALQ

SEQ ID NO: 68493 - protein, 275 aa, Bacillus subtilis
AQVTPWGITHINAHKAHSSSVTGSGVKVAVLDTGIDASHPDLNVKGGASFISGEPNALVDTNGHGTHVAGTVAALNNTIGVVGVAYNADLYAVKVLSASGSGTLSGIAQGVEWAIANNMDVINMSLGGSSGSTALKQAVDNAYASGIVVVAAAGNSGTRGRQNTMQYPARYSSVIAVGAVDSNNNRASFSSVGAELEVMAPGVSVLSTVPGGGYASYNGTSMASPHVAGAAALIKAKYPSLSASQIRDRLRNTATYLGPPFYYGNGVINVERALQ

SEQ ID NO: 68494 - protein, 275 aa, Bacillus subtilis
AQTTPWGITHINAHKAHSSSVTGSGVKVAVLDTGIDASHEDLNVKGGASFISGEPNALVDTNGHGTHVAGTVAALNNTIGVVGVAYNADLYAVKVLSASGSGTLSGIAQGVEWAIANNMDVINMSLGGSSGSTALKQAVDNAYASGIVVVAAAGNSGTRGRQNTMGYPARYSSVIAVGAVDSNNQRASFSSVGAELEVMAPGVSVLSTVPGGGYASYNGTSMASPHVAGAAALIKAKYPSLSASQIRDRLRNTATYLGDPFYYGNGVINVERALQ

SEQ ID NO: 68495 - protein, 275 aa, Bacillus subtilis
AQTTPWGITHINAHKAHSSSVTGSGVKVAVLDTGIDASHEDLNVKGGASFISGEPNALVDTNGHGTHVAGTVAALDNNIGVVGVAYNADLYAVKVLSASGSGTLSGIAQGVEWAIANNMDVINMSLGGSSGSTALKQAVDNAYASGIVVVAAAGNSGTRGRQNTMGYPARYSSVIAVGAVDSNNQRASFSSVGAELEVMAPGVSVLSTVPGGGYASYNGTSMASPHVAGAAALIKAKYPSLSASQIRDRLRNTATYLGDPFYYGNGVINVERALQ

SEQ ID NO: 68496 - protein, 275 aa, Bacillus sp. LG1
AQTVPWGIPHIKADKAHAAGVTGSGVKVAILDTGIDANHADLNVKGGASFVSGEPNALQDGNGHGTHVAGTVAALNNTTGVLGVAYNADLYAVKVLSASGSGTLSGIAQGIEWSISNGMNVINMSLGGSSGSTALQQACNNAYNRGIVVIAAAGNSGSSGNRNTMGYPARYSSVIAVGAVSSNNTRASFSSVGSELEVMAPGVNILSTTPGNNYATFNGTSMAAPHVAGAAALIKAKYPSMTNVQIRERLKNTATNLGDPFFYGKGVINVESALQ

SEQ ID NO: 68497 - protein, 275 aa, Bacillus sp. LG1
AQTVPWGIPHIKADKAHAAGVTGSGVKVAILDTGIDANHADLNVKGGASFVSGEPNALQDGNGHGTHVAGTVAALNNTTGVLGVAYNADLYAVKVLSASGSGSLSGIAQGIEWSISNGMNVINMSLGGSSGSTALQQACNNAYNRGIVVIAAAGNSGSSGNRNTMGYPARYSSVIAVGAVSSNNTRASFSSVGSELEVMAPGVNILSTTPGNNYASFNGTSMAAPHVAGAAALIKAKYPSMTNVQIRERLKNTATNLGDPFFYGKGVINVESALQ

SEQ ID NO: 68498 - protein, 275 aa, Bacillus subtilis
AQTTPWGIEHINAHKAHSSSVTGSGVKVAVLDTGIDASHPDLNVKGGASFISGEPNALVDTNGHGTHVAGTVAALNNNIGVVGVAYNADLYAVKVLSASGSGTLSGIAQGVEWAIANNMDVINMSLGGSSGSTALKQAVDNAYASGIVVVAAAGNSGTRGRQNTMGYPARYSSVIAVGAVDSNNQRASFSSVGAELEVMAPGVSVLSTVPGGGYASYNGTSMASPHVAGAAALIKAKYPSLSASQIRDRLRNTATYLGDPFYYGNGVINVERALQ

SEQ ID NO: 68499 - protein, 275 aa, Bacillus sp. LG1
AQTVPWGIPHIKADKAHAAGVTGSGVKVAILDTGIDANHADLNVKGGASFVSGEPNALQDGNGHGTHVAGTVAALNNTTGVLGVAYNADLYAVKVLSASGSGTLSGIAQGIEWSISNGMNVINMSLGGSSGSTALQQACNNAYNRGIVVIAAAGNSGSSGNRNTMGYPARYSSVIAVGAVSSNNTRASFSSVGSELEVMAPGVNILSTTPGNNYASFNGTSMAAPHVAGAAALIKAKYPSMTNVQVRERLKNTATNLGDPFFYGKGVINVESALQ

SEQ ID NO: 68500 - protein, 275 aa, Bacillus sp. LG1
AQTVPWGIPHIKADKAHAAGVTGSGVKVAILDTGIDANHADLNVKGGASFVSGEPNNLQDGNGHGTHVAGTVAALNNTTGVLGVAYNADLYAVKVLSASGSGTLSGIAQGIEWSISNGMNVINMSLGGSSGSTALQQACNNAYNRGIVVIAAAGNSGSSGNRNTMGYPARYSSVIAVGAVSSNNTRASFSSVGSELEVMAPGVNILSTTPGNNYASFNGTSMAAPHVAGAAALIKAKYPSMTNVQIRERLKNTATNLGDPFFYGKGVINVESALQ

SEQ ID NO: 68501 - protein, 275 aa, Bacillus subtilis
AQTTPWGITHINAHKAHSSSVTGSGVKVAVLDTGIDASHPDLNVKGGASFISGEPNALVDTNGHGTHVSGTVAALNNNIGVVGVAYNADLYAVKVLSASGSGTLSGIAQGVEWAIANNMDVINMSLGGSSGSTALKQAVDNAYASGIVVVAAAGNSGTRGRQNTMGYPARYSSVIAVGAVDSNNNRASFSSVGAELEVMAPGVSVLSTVPGGGYASYNGTSMASPHVAGAAALIKAKYPSLSASQIRDRLRNTATYLGPPFYYGNGVINVERALQ

SEQ ID NO: 68502 - protein, 275 aa, Bacillus subtilis
AQTTPWGIEHINAHKAHSSSVTGSGVKVAVLDTGIDASHEDLNVKGGASFISGEPNALVDTNGHGTHVAGTVAALNNNIGVVGVAYNADLYAVKVLSASGSGTLSGIAQGVEWAIANNMDVINMSLGGSSGSTALKQAVDNAYASGIVVVAAAGNSGTRGRQNTMGYPARYSSVIAVGAVDSNNNRASFSSVGAELEVMAPGVSVLSTVPGGGYASYNGTSMASPHVAGAAALIKAKYPSLSASQIRDRLRNTATYLGDPFYYGNGVINVERALQ

SEQ ID NO: 68503 - protein, 275 aa, Bacillus subtilis
AQTTPWGITHINAHKAHSSSVTGSGVKVAVLDTGIDASHPDLNVKGGASFISGEPNALVDTNGHGTHVAGTVAALNNNIGVVGVAYNADLYAVKVLSASGSGTLSGIAQGVEWAIANNMDVINMSLGGSSGSTALKQAVDNAYASGIVVVAAAGNSGTRGRQNTMGYPARYSSVIAVGAVDSNNQRASFSSVGAELEVMAPGVSVLSTVPGGGYASYNGTSMASPHVAGAAALIKAKYPSLSASQIRDRLRNTATYLGDPFYYGNGVINVERALQ

SEQ ID NO: 68504 - protein, 275 aa, Bacillus subtilis
AQTTPWGITHINAHKAHSSSVTGSGVKVAVLDTGIDASHPDLNVKGGASFISGEPNALVDTNGHGTHVAGTVAALNNNIGVVGVAYNADLYAVKVLSASGSGTLSGIAQGVEWAIANNMDVINMSLGSSSGSTALKQAVDNAYASGIVVVAAAGNSGTRGRQNTMGYPARYSSVIAVGAVDSNNNRASFSSVGAELEVMAPGVSVLSTVPGGGYASYNGTSMASPHVAGAAALIKAKYPSLSASQIRDRLRNTATYLGDPFYYGNGVINVERALQ

SEQ ID NO: 68505 - protein, 275 aa, Bacillus subtilis
AQTTPWGITHINAHKAHSSSVTGSGVKVAVLDTGIDASHPDLNVKGGASFISGEPNALVDTNGHGTHVAGTVAALNNNIGVVGVAYNADLYAVKVLSASGSGTLSGIAQGVEWAIANNMDVINISLGGSSGSTALKQAVDNAYASGIVVVAAAGNSGTRGRQNTMGYPARYSSVIAVGAVDSNNNRASFSSVGAELEVMAPGVSVLSTVPGGGYASYNGTSMASPHVAGAAALIKAKYPSLSASQIRDRLRNTATYLGDPFYYGNGVINVERALQ

SEQ ID NO: 68506 - protein, 275 aa, Bacillus subtilis
AQTTPWGIEHINAHKAHSSSVTGSGVKVAVLDTGIDASHEDLNVKGGASFISGEPNALVDTNGHGTHVSGTVAALNNTIGVVGVAYNADLYAVKVLSASGSGTLSGIAQGVEWAIANNMDVINMSLGGSSGSTALKQAVDNAYASGIVVVAAAGNSGTRGRQNTMGYPARYSSVIAVGAVDSNNNRASFSSVGAELEVMAPGVSVLSTVPGGGYASYNGTSMASPHVAGAAALIKAKYPSLSASQIRDRLRNTATYLGDPFYYGNGVINVERALQ

SEQ ID NO: 68507 - protein, 275 aa, Bacillus subtilis
AQTTPWGITHINAHKAHSSSVTGSGVKVAVLDTGIDASHPDLNVKGGASFISGEPNALVDTNGHGTHVAGTVAALNNTIGVVGVAYNADLYAVKVLSASGSGTLSGIAQGVEWAIANNMDVINMSLGGSSGSTALKQAVDNAYASGIVVVAAAGNSGTRGRQNTMQYPARYSSVIAVGAVDSNNQRASFSSVGAELEVMAPGVSVLSTVPGGGYASYNGTSMASPHVAGAAALIKAKYPSLSASQIRDRLRNTATYLGPPFYYGNGVINVERALQ

SEQ ID NO: 68508 - protein, 275 aa, Bacillus sp. LG1
AQTVPWGIPHIKADKAHAAGVTGSGVKVAILDTGIDANHADLNVKGGASFVSGEPAALQDGNGHGTHVAGTVAALNNTTGVLGVAYNADLYAVKVLSASGSGTLSGIAQGIEWSISNGMNVINMSLGGSSGSTALQQACNNAYNRGIVVIAAAGNSGSSGNRNTMGYPARYSSVIAVGAVSSNNTRASFSSVGSELEVMAPGVNILSTTPGNNYASFNGTSMAAPHVAGAAALIKAKYPSMTNVQIRERLKNTATNLGDPFFYGKGVINVESALQ

SEQ ID NO: 68509 - protein, 275 aa, Bacillus subtilis
AQTTPWGITHINAHKAHSSSVTGSGVKVAVLDTGIDASHPDLNVKGGASFISGEPNALVDTNGHGTHVAGTVAALDNNIGVVGVAYNADLYAVKVLSASGSGTLSGIAQGVEWAIANNMDVINMSLGGSSGSTALKQAVDNAYASGIVVVAAAGNSGTRGRQNTMQYPARYSSVIAVGAVDSNNNRASFSSVGAELEVMAPGVSVLSTVPGGGYASYSGTSMASPHVAGAAALIKAKYPSLSASQIRDRLRNTATYLGDPFYYGNGVINVERALQ

SEQ ID NO: 68510 - protein, 275 aa, Bacillus subtilis
AQTTPWGITHINAHKAHSSSVTGSGVKVAVLDTGIDASHEDLNVKGGASFISGEPNALVDTNGHGTHVAGTVAALNNTIGVVGVAYNADLYAVKVLSASGSGTLSGIAQGVEWAIANNMDVINMSLGGSSGSTALKQAVDNAYASGIVVVAAAGNSGTRGRQNTMGYPARYSSVIAVGAVDSNNNRASFSSVGAELEVMAPGVSVLSTVPGGGYASYSGTSMASPHVAGAAALIKAKYPSLSASQIRDRLRNTATYLGDPFYYGNGVINVERALQ

SEQ ID NO: 68511 - protein, 275 aa, Bacillus subtilis
AQTTPWGITHINAHKAHSSSVTGSGVKVAVLDTGIDASHEDLNVKGGASFISGEPNALVDTNGHGTHVAGTVAALDNNIGVVGVAYNADLYAVKVLSASGSGTLSGIAQGVEWAIANNMDVINMSLGGSSGSTALKQAVDNAYASGIVVVAAAGNSGTRGRQNTMGYPARYSSVIAVGAVDSNNNRASFSSVGAELEVMAPGVSVLSTVPGGGYASYSGTSMASPHVAGAAALIKAKYPSLSASQIRDRLRNTATYLGDPFYYGNGVINVERALQ

SEQ ID NO: 68512 - protein, 275 aa, Bacillus sp. LG1
AQTVPWGIPHIKADKAHAAGVTGSGVKVAILDTGIDANHADLNVKGGASFVSGEPNALQDGNGHGTHVAGTVAALNNTTGVLGVAYNADLYAVKVLSASGSGTLSGIAQGIEWSISNGMNVINMSLGGSSGSTALQQACNNAYNRGIVVIAAAGNSGSSGNRNTMGYPARYSSVIAVGAVSSNNTRASFSSVGSELEVMAPGVNILSTTPGNNYASFNGTSMAAPHVAGAAALIKAKYPSMTNVQIRERLKSTATNLGDPFFYGKGVINVESALQ

SEQ ID NO: 68513 - protein, 275 aa, Bacillus subtilis
AQTTPWGIEHINAHKAHSSSVTGSGVKVAVLDTGIDASHEDLNVKGGASFISGEPNALVDTNGHGTHVSGTVAALNNTIGVVGVAYNADLYAVKVLSASGSGTLSGIAQGVEWAIANNMDVINMSLGGSSGSTALKQAVDNAYASGIVVVAAAGNSGTRGRQNTMGYPARYSSVIAVGAVDSNNNRASFSSVGAELEVMAPGVSVLSTVPGGGYASYNGTSMASPHVAGAAALIKAKYPSLSASQIRDRLRNTATYLGPPFYYGNGVINVERALQ

SEQ ID NO: 68514 - protein, 275 aa, Bacillus sp. LG1
AQTVPWGIPHIKADKAHAAGVTGSGVKVAILDTGIDANHADLNVKGGASFVSGEPNALQDGNGHGTHVAGTVAALNNTTGVLGVAYNADLYAVKVLSASGSGTLSGIAQGIEWSISNGMNVINMSLGGSSGSTALQQACNNAYNRGIVVIAAAGNSGSSGNRNTMGYPARYSSVIAVGAVSSNSTRASFSSVGSELEVMAPGVNILSTTPGNNYASFNGTSMAAPHVAGAAALIKAKYPSMTNVQIRERLKNTATNLGDPFFYGKGVINVESALQ

SEQ ID NO: 68515 - protein, 275 aa, Bacillus sp. LG1
AQTVPWGIPHIKADKAHAAGVTGSGVKVAILDTGIDANHADLNVKGGASFVSGEPNALQDGNGHGTHVAGTVAALNNTTGVLGVAYNADLYAVKVLSASGSGTLSGIAQGIEWSISNGMNVINMSLGGSSGSTALQQACNNAYNRGIVVVAAAGNSGSSGNRNTMGYPARYSSVIAVGAVSSNNTRASFSSVGSELEVMAPGVNILSTTPGNNYASFNGTSMAAPHVAGAAALIKAKYPSMTNVQIRERLKNTATNLGDPFFYGKGVINVESALQ

SEQ ID NO: 68516 - protein, 275 aa, Bacillus sp. LG1
AQTVPWGIPHIKADKAHAAGVTGSGVKVAILDTGIDANHADLNVKGGASFVSGEPNALQDGNGHGTHVAGTVAALDNTTGVLGVAYNADLYAVKVLSASGSGTLSGIAQGIEWSISNGMNVINMSLGGSSGSTALQQACNNAYNRGIVVIAAAGNSGSSGNRNTMGYPARYSSVIAVGAVSSNNTRASFSSVGSELEVMAPGVNILSTTPGNNYASFNGTSMAAPHVAGAAALIKAKYPSMTNVQIRERLKNTATNLGDPFFYGKGVINVESALQ

SEQ ID NO: 68517 - protein, 275 aa, Bacillus sp. LG1
AQTVPWGIPLIKADKAHAAGVTGSGVKVAILDTGIDANHADLNVKGGASFVSGEPNALQDGNGHGTHVAGTVAALNNTTGVLGVAYNADLYAVKVLSASGSGTLSGIAQGIEWSISNGMNVINMSLGGSSGSTALQQACNNAYNRGIVVIAAAGNSGSSGNRNTMGYPARYSSVIAVGAVSSNNTRASFSSVGSELEVMAPGVNILSTTPGNNYASFNGTSMAAPHVAGAAALIKAKYPSMTNVQIRERLKNTATNLGDPFFYGKGVINVESALQ

SEQ ID NO: 68518 - protein, 275 aa, Bacillus sp. LG1
AQTVPYGIPHIKADKAHAAGVTGSGVKVAILDTGIDANHADLNVKGGASFVSGEPNALQDGNGHGTHVAGTVAALNNTTGVLGVAYNADLYAVKVLSASGSGTLSGIAQGIEWSISNGMNVINMSLGGSSGSTALQQACNNAYNRGIVVIAAAGNSGSSGNRNTMGYPARYSSVIAVGAVSSNNTRASFSSVGSELEVMAPGVNILSTTPGNNYASFNGTSMAAPHVAGAAALIKAKYPSMTNVQIRERLKNTATNLGDPFFYGKGVINVESALQ

SEQ ID NO: 68519 - protein, 275 aa, Bacillus sp. LG1
AQTVPWGIPHIKADKAHAAGVTGSGVKVAILDTGIDANHADLNVKGGASFVSGEPNALQDGNGHGTHVAGTVAALNNTTGVLGVAYNADLYAVKVLNASGSGTLSGIAQGIEWSISNGMNVINMSLGGSSGSTALQQACNNAYNRGIVVIAAAGNSGSSGNRNTMGYPARYSSVIAVGAVSSNNTRASFSSVGSELEVMAPGVNILSTTPGNNYASFNGTSMAAPHVAGAAALIKAKYPSMTNVQIRERLKNTATNLGDPFFYGKGVINVESALQ

SEQ ID NO: 68520 - protein, 275 aa, Bacillus subtilis
AQTTPWGITHINAHKAHSSSVTGSGVKVAVLDTGIDASHPDLNVKGGASFISGEPNALVDTNGHGTHVSGTVAALNNTIGVVGVAYNADLYAVKVLSASGSGTLSGIAQGVEWAIANNMDVINMSLGGSSGSTALKQAVDNAYASGIVVVAAAGNSGTRGRQNTMGYPARYSSVIAVGAVDSNNQRASFSSVGAELEVMAPGVSVLSTVPGGGYASYNGTSMASPHVAGAAALIKAKYPSLSASQIRDRLRNTATYLGDPFYYGNGVINVERALQ

SEQ ID NO: 68521 - protein, 275 aa, Bacillus subtilis
AQVTPWGIEHINAHKAHSSSVTGSGVKVAVLDTGIDASHPDLNVKGGASFISGEPNALVDTNGHGTHVAGTVAALNNTIGVVGVAYNADLYAVKVLSASGSGTLSGIAQGVEWAIANNMDVINMSLGGSSGSTALKQAVDNAYASGIVVVAAAGNSGTRGRQNTMGYPARYSSVIAVGAVDSNNQRASFSSVGAELEVMAPGVSVLSTVPGGGYASYNGTSMASPHVAGAAALIKAKYPSLSASQIRDRLRNTATYLGDPFYYGNGVINVERALQ

SEQ ID NO: 68522 - protein, 275 aa, Bacillus subtilis
AQTTPWGITHINAHKAHSSSVTGSGVKVAVLDTGIDASHPDLNVKGGASFISGEPNALVDTNGHGTHVAGTVAALNNTIGVVGVAYNADLYAVKVLSASGSGTLSGIAQGVEWAIANNMDVINMSLGGSSGSTALKQAVDNAYASGIVVVAAAGNSGTRGRQNTMGYPARYSSVIAVGAVDSNNQRASFSSVGAELEVMAPGVSVLSTVPGGGYASYSGTSMASPHVAGAAALIKAKYPSLSASQIRDRLRNTATYLGDPFYYGNGVINVERALQ

SEQ ID NO: 68523 - protein, 275 aa, Bacillus subtilis
AQTTPWGITHINAHKAHSSSVTGSGVKVAVLDTGIDASHEDLNVKGGASFISGEPNALVDTNGHGTHVAGTVAALNNNIGVVGVAYNADLYAVKVLSASGSGTLSGIAQGVEWAIANNMDVINMSLGGSSGSTALKQAVDNAYASGIVVVAAAGNSGTRGRQNTMGYPARYSSVIAVGAVDSNNNRASFSSVGAELEVMAPGVSVLSTVPGGGYASYNGTSMASPHVAGAAALIKAKYPSLSASQIRDRLRNTATYLGPPFYYGNGVINVERALQ

SEQ ID NO: 68524 - protein, 275 aa, Bacillus subtilis
AQTTPWGITHINAHKAHSSSVTGSGVKVAVLDTGIDASHPDLNVKGGASFISGEPNALVDTNGHGTHVAGTVAALNNTIGVVGVAYNADLYAVKVLSASGSGTLSGIAQGVEWAIANNMDVINMSLGGSSGSTALKQAVDNAYASGIVVVAAAGNSGTRGRQNTMQYPARYSSVIAVGAVDSNNQRASFSSVGAELEVMAPGVSVLSTVPGGGYASYNGTSMASPHVAGAAALIKAKYPSLSASQIRDRLRNTATYLGDPFYYGNGVINVERALQ

SEQ ID NO: 68525 - protein, 275 aa, Bacillus subtilis
AQTTPWGITHINAHKAHSSSVTGSGVKVAVLDTGIDASHPDLNVKGGASFISGEPNALVDTNGHGTHVAGTVAALNNNIGVVGVAYNADLYAVKVLSASGSGTLSGIAQGVEWAIANNMDVINMSLGGSSGSTALKQAVDNAYASGIVVVAAAGNSGTRGRQNTMGYPARYSSVIAVGAVDSNNQRASFSSVGAELEVMAPGVSVLSTVPGGGYASYNGTSMASPHVAGAAALIKAKYPSLSASQIRDRLRNTATYLGPPFYYGNGVINVERALQ

SEQ ID NO: 68526 - protein, 275 aa, Bacillus subtilis
AQTTPWGIEHINAHKAHSSSVTGSGVKVAVLDTGIDASHPDLNVKGGASFISGEPNALVDTNGHGTHVAGTVAALNNTIGVVGVAYNADLYAVKVLSASGSGTLSGIAQGVEWAIANNMDVINMSLGGSSGSTALKQAVDNAYASGIVVVAAAGNSGTRGRQNTMGYPARYSSVIAVGAVDSNNQRASFSSVGAELEVMAPGVSVLSTVPGGGYASYSGTSMASPHVAGAAALIKAKYPSLSASQIRDRLRNTATYLGDPFYYGNGVINVERALQ

SEQ ID NO: 68527 - protein, 275 aa, Bacillus subtilis
AQTTPWGITHINAHKAHSSSVTGSGVKVAVLDTGIDASHPDLNVKGGASFISGEPNALVDTNGHGTHVAGTVAALNNTIGVVGVAYNADLYAVKVLSASGSGTLSGIAQGVEWAIANNMDVINMSLGSSSGSTALKQAVDNAYASGIVVVAAAGNSGTRGRQNTMGYPARYSSVIAVGAVDSNNNRASFSSVGAELEVMAPGVSVLSTVPGGGYASYSGTSMASPHVAGAAALIKAKYPSLSASQIRDRLRNTATYLGDPFYYGNGVINVERALQ

SEQ ID NO: 68528 - protein, 275 aa, Bacillus subtilis
AQTTPWGITHINAHKAHSSSVTGSGVKVAVLDTGIDASHPDLNVKGGASFISGEPNALVDTNGHGTHVSGTVAALNNTIGVVGVAYNADLYAVKVLSASGSGTLSGIAQGVEWAIANNMDVINMSLGGSSGSTALKQAVDNAYASGIVVVAAAGNSGTRGRQNTMQYPARYSSVIAVGAVDSNNNRASFSSVGAELEVMAPGVSVLSTVPGGGYASYNGTSMASPHVAGAAALIKAKYPSLSASQIRDRLRNTATYLGPPFYYGNGVINVERALQ

SEQ ID NO: 68529 - protein, 275 aa, Bacillus subtilis
AQTTPWGIEHINAHKAHSSSVTGSGVKVAVLDTGIDASHPDLNVKGGASFISGEPNALVDTNGHGTHVAGTVAALNNTIGVVGVAYNADLYAVKVLSASGSGTLSGIAQGVEWAIANNMDVINMSLGGSSGSTALKQAVDNAYASGIVVVAAAGNSGTRGRQNTMQYPARYSSVIAVGAVDSNNNRASFSSVGAELEVMAPGVSVLSTVPGGGYASYSGTSMASPHVAGAAALIKAKYPSLSASQIRDRLRNTATYLGDPFYYGNGVINVERALQ

SEQ ID NO: 68530 - protein, 275 aa, Bacillus subtilis
AQTTPWGITHINAHKAHSSSVTGSGVKVAVLDTGIDASHPDLNVKGGASFISGEPNALVDTNGHGTHVAGTVAALNNNIGVVGVAYNADLYAVKVLSASGSGTLSGIAQGVEWAIANNMDVINMSLGGSSGSTALKQAVDNAYASGIVVVAAAGNSGTRGRQNTMGYPARYSSVIAVGAVDSNNNRASFSSVGAELEVMAPGVSVLSTVPGGGYASYSGTSMASPHVAGAAALIKAKYPSLSASQIRDRLRNTATYLGPPFYYGNGVINVERALQ

SEQ ID NO: 68531 - protein, 275 aa, Bacillus sp. LG1
AQTVPWGIPHIKADKAHAAGVTGSGVKVAILDTGIDANHADLNVKGGASFVSGEPNALQDGNGHGTHVAGTVAALNNTTGVLGVAYNADLYAVKVLSASGSGTLSGIAQGIEWSISNGMNVINMSLGGASGSTALQQACNNAYNRGIVVIAAAGNSGSSGNRNTMGYPARYSSVIAVGAVSSNNTRASFSSVGSELEVMAPGVNILSTTPGNNYASFNGTSMAAPHVAGAAALIKAKYPSMTNVQIRERLKNTATNLGDPFFYGKGVINVESALQ

SEQ ID NO: 68532 - protein, 275 aa, Bacillus sp. LG1
AQTVPWGIPHIKADKAHAAGVTGSGVKVAILDTGIDANHADLNVKGGASFVSGEPNALQDGNGHGTHVAGTVAALNNTTGVLGVAYNADLYAVKVLSASGSGTLSGIAQGIEWSISNGMNVINMSLGGSSGSTALQQACNNAYNRGIVVIAAAGNSGSSGNRNTMGYPARYSSVIAVGAVSSNNTRASFSSVGSELEVMAPGVNILSTYPGNNYASFNGTSMAAPHVAGAAALIKAKYPSMTNVQIRERLKNTATNLGDPFFYGKGVINVESALQ

SEQ ID NO: 68533 - protein, 275 aa, Bacillus subtilis
AQVTPWGITHINAHKAHSSSVTGSGVKVAVLDTGIDASHEDLNVKGGASFISGEPNALVDTNGHGTHVAGTVAALNNTIGVVGVAYNADLYAVKVLSASGSGTLSGIAQGVEWAIANNMDVINMSLGGSSGSTALKQAVDNAYASGIVVVAAAGNSGTRGRQNTMGYPARYSSVIAVGAVDSNNNRASFSSVGAELEVMAPGVSVLSTVPGGGYASYNGTSMASPHVAGAAALIKAKYPSLSASQIRDRLRNTATYLGPPFYYGNGVINVERALQ

SEQ ID NO: 68534 - protein, 275 aa, Bacillus sp. LG1
AQTVPWGIPHIKADKAHAAGFTGSGVKVAILDTGIDANHADLNVKGGASFVSGEPNALQDGNGHGTHVAGTVAALNNTTGVLGVAYNADLYAVKVLSASGSGTLSGIAQGIEWSISNGMNVINMSLGGSSGSTALQQACNNAYNRGIVVIAAAGNSGSSGNRNTMGYPARYSSVIAVGAVSSNNTRASFSSVGSELEVMAPGVNILSTTPGNNYASFNGTSMAAPHVAGAAALIKAKYPSMTNVQIRERLKNTATNLGDPFFYGKGVINVESALQ

SEQ ID NO: 68535 - protein, 275 aa, Bacillus subtilis
AQVTPWGITHINAHKAHSSSVTGSGVKVAVLDTGIDASHPDLNVKGGASFISGEPNALVDTNGHGTHVAGTVAALNNTIGVVGVAYNADLYAVKVLSASGSGTLSGIAQGVEWAIANNMDVINMSLGGSSGSTALKQAVDNAYASGIVVVAAAGNSGTRGRQNTMGYPARYSSVIAVGAVDSNNQRASFSSVGAELEVMAPGVSVLSTVPGGGYASYNGTSMASPHVAGAAALIKAKYPSLSASQIRDRLRNTATYLGPPFYYGNGVINVERALQ

SEQ ID NO: 68536 - protein, 275 aa, Bacillus subtilis
AQTTPWGIEHINAHKAHSSSVTGSGVKVAVLDTGIDASHPDLNVKGGASFISGEPNALVDTNGHGTHVSGTVAALNNTIGVVGVAYNADLYAVKVLSASGSGTLSGIAQGVEWAIANNMDVINMSLGGSSGSTALKQAVDNAYASGIVVVAAAGNSGTRGRQNTMQYPARYSSVIAVGAVDSNNNRASFSSVGAELEVMAPGVSVLSTVPGGGYASYNGTSMASPHVAGAAALIKAKYPSLSASQIRDRLRNTATYLGDPFYYGNGVINVERALQ

SEQ ID NO: 68537 - protein, 275 aa, Bacillus subtilis
AQTTPWGITHINAHKAHSSSVTGSGVKVAVLDTGIDASHEDLNVKGGASFISGEPNALVDTNGHGTHVSGTVAALNNTIGVVGVAYNADLYAVKVLSASGSGTLSGIAQGVEWAIANNMDVINMSLGGSSGSTALKQAVDNAYASGIVVVAAAGNSGTRGRQNTMGYPARYSSVIAVGAVDSNNNRASFSSVGAELEVMAPGVSVLSTVPGGGYASYNGTSMASPHVAGAAALIKAKYPSLSASQIRDRLRNTATYLGPPFYYGNGVINVERALQ

SEQ ID NO: 68538 - protein, 275 aa, Bacillus sp. LG1
AQTVPWGIPHIKADKAHAAGVTGSGVKVAILDTGIDANHADLNVKGGASFVSGEPNALQDGNGHGTHVAGTVAALNNTTGVLGVAYNADLYAVKVLSASGSGTLSGIAQGIEWSISNGMNVINMSLGGSSGSTALQQACNNAYNRGIVVIAAAGNSGSSGNRNTMGYPARYSSVIAVGAVSSNNTRASFSSVGSELEVMAPGVNILSTTPGNNYASFNGTSMAAPHVAGAAALIKAKYPSMTNVQIRERLSNTATNLGDPFFYGKGVINVESALQ

SEQ ID NO: 68539 - protein, 275 aa, Bacillus subtilis
AQVTPWGIEHINAHKAHSSSVTGSGVKVAVLDTGIDASHEDLNVKGGASFISGEPNALVDTNGHGTHVAGTVAALNNTIGVVGVAYNADLYAVKVLSASGSGTLSGIAQGVEWAIANNMDVINMSLGGSSGSTALKQAVDNAYASGIVVVAAAGNSGTRGRQNTMGYPARYSSVIAVGAVDSNNNRASFSSVGAELEVMAPGVSVLSTVPGGGYASYNGTSMASPHVAGAAALIKAKYPSLSASQIRDRLRNTATYLGDPFYYGNGVINVERALQ

SEQ ID NO: 68540 - protein, 275 aa, Bacillus subtilis
AQTTPWGIEHINAHKAHSSSVTGSGVKVAVLDTGIDASHEDLNVKGGASFISGEPNALVDTNGHGTHVAGTVAALNNTIGVVGVAYNADLYAVKVLSASGSGTLSGIAQGVEWAIANNMDVINMSLGGSSGSTALKQAVDNAYASGIVVVAAAGNSGTRGRQNTMGYPARYSSVIAVGAVDSNNQRASFSSVGAELEVMAPGVSVLSTVPGGGYASYNGTSMASPHVAGAAALIKAKYPSLSASQIRDRLRNTATYLGPPFYYGNGVINVERALQ

SEQ ID NO: 68541 - protein, 275 aa, Bacillus subtilis
AQTTPWGIEHINAHKAHSSSVTGSGVKVAVLDTGIDASHPDLNVKGGASFISGEPNALVDTNGHGTHVAGTVAALNNNIGVVGVAYNADLYAVKVLSASGSGTLSGIAQGVEWAIANNMDVINMSLGGSSGSTALKQAVDNAYASGIVVVAAAGNSGTRGRQNTMGYPARYSSVIAVGAVDSNNNRASFSSVGAELEVMAPGVSVLSTVPGGGYASYSGTSMASPHVAGAAALIKAKYPSLSASQIRDRLRNTATYLGDPFYYGNGVINVERALQ

SEQ ID NO: 68542 - protein, 275 aa, Bacillus subtilis
AQTTPWGITHINAHKAHSSSVTGSGVKVAVLDTGIDASHPDLNVKGGASFISGEPNALVDTNGHGTHVSGTVAALNNTIGVVGVAYNADLYAVKVLSASGSGTLSGIAQGVEWAIANNMDVINMSLGGSSGSTALKQAVDNAYASGIVVVAAAGNSGTRGRQNTMGYPARYSSVIAVGAVDSNNNRASFSSVGAELEVMAPGVSVLSTVPGGGYASYSGTSMASPHVAGAAALIKAKYPSLSASQIRDRLRNTATYLGPPFYYGNGVINVERALQ

SEQ ID NO: 68543 - protein, 275 aa, Bacillus sp. LG1
AQTVPWGIPHIKADKAHAAGVTGSGVKVAILDTGIDANHADLNVKGGASFVSGEPNALQDGNGHGTHVAGTVAALNNTTGVLGVAYNADLYAVKVLSASGSGTLSGIAQGIEWSISNGMNVINMSLGGSSGSTALQQACNNAYNRGIVVIAAAGNSGSSGNRNTMGYPARYSSVIAVGAVSSNNTRASFSSVGSELEVMAPGVNILSTTPGNNYASFNGTSMAAPHVAGAAALIKAKYPSMSNVQIRERLKNTATNLGDPFFYGKGVINVESALQ

SEQ ID NO: 68544 - protein, 275 aa, Bacillus sp. LG1
AQTVPWGIPHIKADKAHAAGVTGSGVKVAILDTGIDANHADLNVKGGASFVSGEPNALQDGNGHGTHVAGTVAALNNTTGVLGVAPNADLYAVKVLSASGSGTLSGIAQGIEWSISNGMNVINMSLGGSSGSTALQQACNNAYNRGIVVIAAAGNSGSSGNRNTMGYPARYSSVIAVGAVSSNNTRASFSSVGSELEVMAPGVNILSTTPGNNYASFNGTSMAAPHVAGAAALIKAKYPSMTNVQIRERLKNTATNLGDPFFYGKGVINVESALQ

SEQ ID NO: 68545 - protein, 275 aa, Bacillus subtilis
AQTTPWGIEHINAHKAHSSSVTGSGVKVAVLDTGIDASHEDLNVKGGASFISGEPNALVDTNGHGTHVAGTVAALNNTIGVVGVAYNADLYAVKVLSASGSGTLSGIAQGVEWAIANNMDVINMSLGGSSGSTALKQAVDNAYASGIVVVAAAGNSGTRGRQNTMGYPARYSSVIAVGAVDSNNNRASFSSVGAELEVMAPGVSVLSTVPGGGYASYSGTSMASPHVAGAAALIKAKYPSLSASQIRDRLRNTATYLGDPFYYGNGVINVERALQ

SEQ ID NO: 68546 - protein, 275 aa, Bacillus subtilis
AQTTPWGITHINAHKAHSSSVTGSGVKVAVLDTGIDASHPDLNVKGGASFISGEPNALVDTNGHGTHVSGTVAALNNTIGVVGVAYNADLYAVKVLSASGSGTLSGIAQGVEWAIANNMDVINMSLGGSSGSTALKQAVDNAYASGIVVVAAAGNSGTRGRQNTMGYPARYSSVIAVGAVDSNNQRASFSSVGAELEVMAPGVSVLSTVPGGGYASYNGTSMASPHVAGAAALIKAKYPSLSASQIRDRLRNTATYLGPPFYYGNGVINVERALQ

SEQ ID NO: 68547 - protein, 275 aa, Bacillus subtilis
AQVTPWGITHINAHKAHSSSVTGSGVKVAVLDTGIDASHPDLNVKGGASFISGEPNALVDTNGHGTHVAGTVAALNNTIGVVGVAYNADLYAVKVLSASGSGTLSGIAQGVEWAIANNMDVINMSLGSSSGSTALKQAVDNAYASGIVVVAAAGNSGTRGRQNTMGYPARYSSVIAVGAVDSNNNRASFSSVGAELEVMAPGVSVLSTVPGGGYASYNGTSMASPHVAGAAALIKAKYPSLSASQIRDRLRNTATYLGDPFYYGNGVINVERALQ

SEQ ID NO: 68548 - protein, 275 aa, Bacillus subtilis
AQVTPWGITHINAHKAHSSSVTGSGVKVAVLDTGIDASHPDLNVKGGASFISGEPNALVDTNGHGTHVAGTVAALNNTIGVVGVAYNADLYAVKVLSASGSGTLSGIAQGVEWAIANNMDVINMSLGGSSGSTALKQAVDNAYASGIVVVAAAGNSGTRGRQNTMGYPARYSSVIAVGAVDSNNNRASFSSVGAELEVMAPGVSVLSTVPGGGYASYSGTSMASPHVAGAAALIKAKYPSLSASQIRDRLRNTATYLGPPFYYGNGVINVERALQ

SEQ ID NO: 68549 - protein, 275 aa, Bacillus subtilis
AQTTPWGITHINAHKAHSSSVTGSGVKVAVLDTGIDASHPDLNVKGGASFISGEPNALVDTNGHGTHVAGTVAALNNNIGVVGVAYNADLYAVKVLSASGSGTLSGIAQGVEWAIANNMDVINMSLGGSSGSTALKQAVDNAYASGIVVVAAAGNSGTRGRQNTMGYPARYSSVIAVGAVDSNNNRASFSSVGAELEVMAPGVSVLSTVPGGGYASYSGTSMASPHVAGAAALIKAKYPSLSASQIRDRLRNTATYLGDPFYYGNGVINVERALQ

SEQ ID NO: 68550 - protein, 275 aa, Bacillus sp. LG1
AQTVPWGIPHIKADKAHAAGVTGSGVKVAILDTGIDANHADLNVKGGASFVSGEPNYLQDGNGHGTHVAGTVAALNNTTGVLGVAYNADLYAVKVLSASGSGTLSGIAQGIEWSISNGMNVINMSLGGSSGSTALQQACNNAYNRGIVVIAAAGNSGSSGNRNTMGYPARYSSVIAVGAVSSNNTRASFSSVGSELEVMAPGVNILSTTPGNNYASFNGTSMAAPHVAGAAALIKAKYPSMTNVQIRERLKNTATNLGDPFFYGKGVINVESALQ

SEQ ID NO: 68551 - protein, 275 aa, Bacillus subtilis
AQVTPWGITHINAHKAHSSSVTGSGVKVAVLDTGIDASHPDLNVKGGASFISGEPNALVDTNGHGTHVAGTVAALNNTIGVVGVAYNADLYAVKVLSASGSGTLSGIAQGVEWAIANNMDVINMSLGGSSGSTALKQAVDNAYASGIVVVAAAGNSGTRGRQNTMGYPARYSSVIAVGAVDSNNNRASFSSVGAELEVMAPGVSVLSTVPGGGYASYSGTSMASPHVAGAAALIKAKYPSLSASQIRDRLRNTATYLGDPFYYGNGVINVERALQ

SEQ ID NO: 68552 - protein, 275 aa, Bacillus subtilis
AQTTPWGITHINAHKAHSSSVTGSGVKVAVLDTGIDASHEDLNVKGGASFISGEPNALVDTNGHGTHVAGTVAALNNTIGVVGVAYNADLYAVKVLSASGSGTLSGIAQGVEWAIANNMDVINMSLGGSSGSTALKQAVDNAYASGIVVVAAAGNSGTRGRQNTMGYPARYSSVIAVGAVDSNNNRASFSSVGAELEVMAPGVSVLSTVPGGGYASYSGTSMASPHVAGAAALIKAKYPSLSASQIRDRLRNTATYLGPPFYYGNGVINVERALQ

SEQ ID NO: 68553 - protein, 275 aa, Bacillus subtilis
AQVTPWGITHINAHKAHSSSVTGSGVKVAVLDTGIDASHPDLNVKGGASFISGEPNALVDTNGHGTHVSGTVAALNNTIGVVGVAYNADLYAVKVLSASGSGTLSGIAQGVEWAIANNMDVINMSLGGSSGSTALKQAVDNAYASGIVVVAAAGNSGTRGRQNTMGYPARYSSVIAVGAVDSNNNRASFSSVGAELEVMAPGVSVLSTVPGGGYASYNGTSMASPHVAGAAALIKAKYPSLSASQIRDRLRNTATYLGDPFYYGNGVINVERALQ

SEQ ID NO: 68554 - protein, 275 aa, Bacillus sp. LG1
AQTVPWGIPHIKADKAHAAGVTGSGVKVAILDTGIDANHADLNVKGGASFVSGEPNALQDGNGHGTHVAGTVAALNNTTGVLGVAYNADLYAVKVLSASGSGTLSGIAQGIEWSISNGMNVINMSLGGSSGSTALQQACNNAYNRGIVVIAAAGNSGSSGNRNTMGYPAKYSSVIAVGAVSSNNTRASFSSVGSELEVMAPGVNILSTTPGNNYASFNGTSMAAPHVAGAAALIKAKYPSMTNVQIRERLKNTATNLGDPFFYGKGVINVESALQ

SEQ ID NO: 68555 - protein, 275 aa, Bacillus sp. LG1
AQTVPWGIPHIKADKAHAAGVTGSGVKVAILDTGIDANHADLNVKGGASFVSGEPNALQDGNGHGTHVAGTVAALNNTTGVLGVAYNADLYAVKVLSASGSGTLSGIAQGIEWSISNGMNVINMSLGGSSGSTALQQACNNAYNRGIVVIAAAGNSGSSGNRNTMGYPARYSSVIAVGAVSSNNTRASFSSVGSELEVMAPGVNILSTTPGNNYASFNGTSMAAPHVAGAAALIKAKYPSMTNVQIRERLKNTATNLGDSFFYGKGVINVESALQ

SEQ ID NO: 68556 - protein, 275 aa, Bacillus subtilis
AQVTPWGITHINAHKAHSSSVTGSGVKVAVLDTGIDASHEDLNVKGGASFISGEPNALVDTNGHGTHVAGTVAALNNTIGVVGVAYNADLYAVKVLSASGSGTLSGIAQGVEWAIANNMDVINMSLGGSSGSTALKQAVDNAYASGIVVVAAAGNSGTRGRQNTMGYPARYSSVIAVGAVDSNNNRASFSSVGAELEVMAPGVSVLSTVPGGGYASYNGTSMASPHVAGAAALIKAKYPSLSASQIRDRLRNTATYLGDPFYYGNGVINVERALQ

SEQ ID NO: 68557 - protein, 275 aa, Bacillus subtilis
AQTTPWGIEHINAHKAHSSSVTGSGVKVAVLDTGIDASHPDLNVKGGASFISGEPNALVDTNGHGTHVAGTVAALNNNIGVVGVAYNADLYAVKVLSASGSGTLSGIAQGVEWAIANNMDVINMSLGGSSGSTALKQAVDNAYASGIVVVAAAGNSGTRGRQNTMQYPARYSSVIAVGAVDSNNNRASFSSVGAELEVMAPGVSVLSTVPGGGYASYNGTSMASPHVAGAAALIKAKYPSLSASQIRDRLRNTATYLGDPFYYGNGVINVERALQ

SEQ ID NO: 68558 - protein, 275 aa, Bacillus subtilis
AQTTPWGIEHINAHKAHSSSVTGSGVKVAVLDTGIDASHPDLNVKGGASFISGEPNALVDTNGHGTHVSGTVAALNNNIGVVGVAYNADLYAVKVLSASGSGTLSGIAQGVEWAIANNMDVINMSLGGSSGSTALKQAVDNAYASGIVVVAAAGNSGTRGRQNTMGYPARYSSVIAVGAVDSNNNRASFSSVGAELEVMAPGVSVLSTVPGGGYASYNGTSMASPHVAGAAALIKAKYPSLSASQIRDRLRNTATYLGDPFYYGNGVINVERALQ

SEQ ID NO: 68559 - protein, 275 aa, Bacillus subtilis
AQVTPWGITHINAHKAHSSSVTGSGVKVAVLDTGIDASHPDLNVKGGASFISGEPNALVDTNGHGTHVAGTVAALNNNIGVVGVAYNADLYAVKVLSASGSGTLSGIAQGVEWAIANNMDVINMSLGGSSGSTALKQAVDNAYASGIVVVAAAGNSGTRGRQNTMGYPARYSSVIAVGAVDSNNNRASFSSVGAELEVMAPGVSVLSTVPGGGYASYNGTSMASPHVAGAAALIKAKYPSLSASQIRDRLRNTATYLGPPFYYGNGVINVERALQ

SEQ ID NO: 68560 - protein, 275 aa, Bacillus subtilis
AQVTPWGITHINAHKAHSSSVTGSGVKVAVLDTGIDASHPDLNVKGGASFISGEPNALVDTNGHGTHVAGTVAALNNTIGVVGVAYNADLYAVKVLSASGSGTLSGIAQGVEWAIANNMDVINMSLGGSSGSTALKQAVDNAYASGIVVVAAAGNSGTRGRQNTMGYPARYSSVIAVGAVDSNNQRASFSSVGAELEVMAPGVSVLSTVPGGGYASYNGTSMASPHVAGAAALIKAKYPSLSASQIRDRLRNTATYLGDPFYYGNGVINVERALQ

SEQ ID NO: 68561 - protein, 275 aa, Bacillus subtilis
AQVTPWGITHINAHKAHSSSVTGSGVKVAVLDTGIDASHPDLNVKGGASFISGEPNALVDTNGHGTHVAGTVAALNNTIGVVGVAYNADLYAVKVLSASGSGTLSGIAQGVEWAIANNMDVINMSLGGSSGSTALKQAVDNAYASGIVVVAAAGNSGTRGRQNTMQYPARYSSVIAVGAVDSNNNRASFSSVGAELEVMAPGVSVLSTVPGGGYASYNGTSMASPHVAGAAALIKAKYPSLSASQIRDRLRNTATYLGDPFYYGNGVINVERALQ

SEQ ID NO: 68562 - protein, 275 aa, Bacillus subtilis
AQVTPWGITHINAHKAHSSSVTGSGVKVAVLDTGIDASHPDLNVKGGASFISGEPNALVDTNGHGTHVAGTVAALNNNIGVVGVAYNADLYAVKVLSASGSGTLSGIAQGVEWAIANNMDVINMSLGGSSGSTALKQAVDNAYASGIVVVAAAGNSGTRGRQNTMGYPARYSSVIAVGAVDSNNNRASFSSVGAELEVMAPGVSVLSTVPGGGYASYNGTSMASPHVAGAAALIKAKYPSLSASQIRDRLRNTATYLGDPFYYGNGVINVERALQ

SEQ ID NO: 68563 - protein, 275 aa, Bacillus sp. LG1
AQTVPWGIPHIKADKAHAAGVTGSGVKVAILDTGIDANHADLNVKGGASFVSGEPNALQDGNGHGTHVAGTVAALNNTTGVLGVAYNADLYAVKVLSASGSGTLSGIAQGIEWSISNGMNVINMSLGGSSGSTALQQACNNAYNRGIVVIAAAGNSGSSGNRNTMGYPARYSSVIAVGAVSSNNTRASFSSVGSELEVMAPGVNILSTTPGNNYASFNGTSMASPHVAGAAALIKAKYPSMTNVQIRERLKNTATNLGDPFFYGKGVINVESALQ

SEQ ID NO: 68564 - protein, 275 aa, Bacillus subtilis
AQTTPWGITHINAHKAHSSSVTGSGVKVAVLDTGIDASHPDLNVKGGASFISGEPNALVDTNGHGTHVAGTVAALNNTIGVVGVAYNADLYAVKVLSASGSGTLSGIAQGVEWAIANNMDVINMSLGGSSGSTALKQAVDNAYASGIVVVAAAGNSGTRGRQNTMQYPARYSSVIAVGAVDSNNNRASFSSVGAELEVMAPGVSVLSTVPGGGYASYSGTSMASPHVAGAAALIKAKYPSLSASQIRDRLRNTATYLGPPFYYGNGVINVERALQ

SEQ ID NO: 68565 - protein, 275 aa, Bacillus sp. LG1
AQTVPWGIPHIKADKAHAAGVTGSGVKVAILDTGIDANHADLNVKGGASFVSGEPNALQDGNGHGTHVAGTVAALNNTTGVLGVAYNADLYAVKVLSASGSGTLSGIAQGIEWSISNGMNVINMSLGGSSGSTALQQACNNAYNRGIVVIAAAGNSGSSGNRNTMGYPARYSSVIAVGAVSSNNTRASFSSVGSELEVMAPGVNIYSTTPGNNYASFNGTSMAAPHVAGAAALIKAKYPSMTNVQIRERLKNTATNLGDPFFYGKGVINVESALQ

SEQ ID NO: 68566 - protein, 275 aa, Bacillus sp. LG1
AQTVPWGIPHIKADKAHAAGVTGSGVKVAILDTGIDANHADLNVKGGASFVSGEPNALQDGNGHGTHVAGTVAALNNTTGVLGVAYNADLYAVKVLSASGSGTLSGIAQGIEWSISNGMNVINMSLGGSSGSTALQQACNNAYNRGIVVIAAAGNSGSSGNRNTMGYPARYSSVIAVGAVSSNNTRASFSSVGSELEVMAPGANILSTTPGNNYASFNGTSMAAPHVAGAAALIKAKYPSMTNVQIRERLKNTATNLGDPFFYGKGVINVESALQ

SEQ ID NO: 68567 - protein, 275 aa, Bacillus subtilis
AQTTPWGITHINAHKAHSSSVTGSGVKVAVLDTGIDASHEDLNVKGGASFISGEPNALVDTNGHGTHVAGTVAALNNTIGVVGVAYNADLYAVKVLSASGSGTLSGIAQGVEWAIANNMDVINMSLGGSSGSTALKQAVDNAYASGIVVVAAAGNSGTRGRQNTMGYPARYSSVIAVGAVDSNNQRASFSSVGAELEVMAPGVSVLSTVPGGGYASYNGTSMASPHVAGAAALIKAKYPSLSASQIRDRLRNTATYLGPPFYYGNGVINVERALQ

SEQ ID NO: 68568 - protein, 275 aa, Bacillus subtilis
AQTTPWGITHINAHKAHSSSVTGSGVKVAVLDTGIDASHPDLNVKGGASFISGEPNALVDTNGHGTHVSGTVAALNNTIGVVGVAYNADLYAVKVLSASGSGTLSGIAQGVEWAIANNMDVINMSLGSSSGSTALKQAVDNAYASGIVVVAAAGNSGTRGRQNTMGYPARYSSVIAVGAVDSNNNRASFSSVGAELEVMAPGVSVLSTVPGGGYASYNGTSMASPHVAGAAALIKAKYPSLSASQIRDRLRNTATYLGDPFYYGNGVINVERALQ

SEQ ID NO: 68569 - protein, 275 aa, Bacillus sp. LG1
AQTVPWGIPHIKADKAHAAGVTGSGVKVAILDTGIDANHADLNVKGGASFVSGEPNALQDGNGHGTHVAGTVAALNNTTGVLGVAYNADLYAVKVLSASGSGTLSGIAQGIEWSISNGMNVINMSLGGSSGSTALQQACNNAYNRGIVVIAAAGNSGSSGNRNTMGYPARYSSVIAVGAVSSNNTRASFSSVGSELEVMAPGVNILSTTPTNNYASFNGTSMAAPHVAGAAALIKAKYPSMTNVQIRERLKNTATNLGDPFFYGKGVINVESALQ

SEQ ID NO: 68570 - protein, 275 aa, Bacillus sp. LG1
AQTVPWGIPHIKADKAHAAGVTGSGVKVAILDTGIDANHADLNVKGGASFVSGEPNALQDGNGHGTHVAGTVAALNNTTGVLGVAYSADLYAVKVLSASGSGTLSGIAQGIEWSISNGMNVINMSLGGSSGSTALQQACNNAYNRGIVVIAAAGNSGSSGNRNTMGYPARYSSVIAVGAVSSNNTRASFSSVGSELEVMAPGVNILSTTPGNNYASFNGTSMAAPHVAGAAALIKAKYPSMTNVQIRERLKNTATNLGDPFFYGKGVINVESALQ

SEQ ID NO: 68571 - protein, 275 aa, Bacillus subtilis
AQTTPWGITHINAHKAHSSSVTGSGVKVAVLDTGIDASHEDLNVKGGASFISGEPNALVDTNGHGTHVAGTVAALNNTIGVVGVAYNADLYAVKVLSASGSGTLSGIAQGVEWAIANNMDVINMSLGGSSGSTALKQAVDNAYASGIVVVAAAGNSGTRGRQNTMQYPARYSSVIAVGAVDSNNNRASFSSVGAELEVMAPGVSVLSTVPGGGYASYNGTSMASPHVAGAAALIKAKYPSLSASQIRDRLRNTATYLGPPFYYGNGVINVERALQ

SEQ ID NO: 68572 - protein, 275 aa, Bacillus sp. LG1
AQTVPWGIPHIKADKAHAAGVTGSGVKVAVLDTGIDANHADLNVKGGASFVSGEPNALQDGNGHGTHVAGTVAALNNTTGVLGVAYNADLYAVKVLSASGSGTLSGIAQGIEWSISNGMNVINMSLGGSSGSTALQQACNNAYNRGIVVIAAAGNSGSSGNRNTMGYPARYSSVIAVGAVSSNNTRASFSSVGSELEVMAPGVNILSTTPGNNYASFNGTSMAAPHVAGAAALIKAKYPSMTNVQIRERLKNTATNLGDPFFYGKGVINVESALQ

SEQ ID NO: 68573 - protein, 275 aa, Bacillus subtilis
AQTTPWGITHINAHKAHSSSVTGSGVKVAVLDTGIDASHPDLNVKGGASFISGEPNALVDTNGHGTHVAGTVAALNNTIGVVGVAYNADLYAVKVLSASGSGTLSGIAQGVEWAIANNMDVINMSLGGSSGSTALKQAVDNAYASGIVVVAAAGNSGTRGRQNTMGYPARYSSVIAVGAVDSNNQRASFSSVGAELEVMAPGVSVLSTVPGGGYASYSGTSMASPHVAGAAALIKAKYPSLSASQIRDRLRNTATYLGPPFYYGNGVINVERALQ

SEQ ID NO: 68574 - protein, 275 aa, Bacillus sp. LG1
AQTVPWGIPHIKADKAHAAGVTGSGVKVAILDTGIDANHADLNVKGGASFVSGEPNALQDGNGHGTHVAGTVAALNNTTGVLGVAYNADLYAVKVLSASGSGTLSGIAQGIEWSISNGMNVINMSLGGSSGSTALQQACNNAYNRGIVVIAAAGNSGSSGNRNTMGYPARYSSVIAVGAVSSNNTRASFSSVGSELEVMAPGVNILSTTPGNNYASFNGTSMAAPHVAGAAALIKAKYPSMTNVQIRERLKNTATNLGDPFFYGKGLINVESALQ

SEQ ID NO: 68575 - protein, 275 aa, Bacillus subtilis
AQVTPWGIEHINAHKAHSSSVTGSGVKVAVLDTGIDASHPDLNVKGGASFISGEPNALVDTNGHGTHVSGTVAALNNTIGVVGVAYNADLYAVKVLSASGSGTLSGIAQGVEWAIANNMDVINMSLGGSSGSTALKQAVDNAYASGIVVVAAAGNSGTRGRQNTMGYPARYSSVIAVGAVDSNNNRASFSSVGAELEVMAPGVSVLSTVPGGGYASYNGTSMASPHVAGAAALIKAKYPSLSASQIRDRLRNTATYLGDPFYYGNGVINVERALQ

SEQ ID NO: 68576 - protein, 275 aa, Bacillus subtilis
AQTTPWGITHINAHKAHSSSVTGSGVKVAVLDTGIDASHPDLNVKGGASFISGEPNALVDTNGHGTHVAGTVAALNNTIGVVGVAYNADLYAVKVLSASGSGTLSGIAQGVEWAIANNMDVINMSLGSSSGSTALKQAVDNAYASGIVVVAAAGNSGTRGRQNTMGYPARYSSVIAVGAVDSNNQRASFSSVGAELEVMAPGVSVLSTVPGGGYASYNGTSMASPHVAGAAALIKAKYPSLSASQIRDRLRNTATYLGDPFYYGNGVINVERALQ

SEQ ID NO: 68577 - protein, 275 aa, Bacillus sp. LG1
AQTVPWGIPHIKADKAHAAGVTGSGVKVAILDTGIDANHADLNVKGGASFVSGEPNALQDGNGHGTHVAGTVAALNNTTGVLGVAYNADLYAVKVLSSSGSGTLSGIAQGIEWSISNGMNVINMSLGGSSGSTALQQACNNAYNRGIVVIAAAGNSGSSGNRNTMGYPARYSSVIAVGAVSSNNTRASFSSVGSELEVMAPGVNILSTTPGNNYASFNGTSMAAPHVAGAAALIKAKYPSMTNVQIRERLKNTATNLGDPFFYGKGVINVESALQ

SEQ ID NO: 68578 - protein, 275 aa, Bacillus sp. LG1
AQTVPWGIPHIKADKAHAAGVTGSGVKVAILDTGIDANHADLNVKGGASFVSGEPNALQDGNGHGTHVAGTVAALNNTTGVLGVAYNADLYAVKVLSASGSGTLSGIAQGIEWSISNGMNVINMSLGGSSGSTALQQACNNAYNRGIVVIAAAGNSGSSGNRNTMGYPARYSSVIAVGAVSSNNTRASFSSVGSELEVMAPGVNILSTTPGNNYASFNGTSMAAPHVAGAAALIKSKYPSMTNVQIRERLKNTATNLGDPFFYGKGVINVESALQ

SEQ ID NO: 68579 - protein, 275 aa, Bacillus subtilis
AQTTPWGITHINAHKAHSSSVTGSGVKVAVLDTGIDASHEDLNVKGGASFISGEPNALVDTNGHGTHVAGTVAALNNNIGVVGVAYNADLYAVKVLSASGSGTLSGIAQGVEWAIANNMDVINMSLGGSSGSTALKQAVDNAYASGIVVVAAAGNSGTRGRQNTMGYPARYSSVIAVGAVDSNNNRASFSSVGAELEVMAPGVSVLSTVPGGGYASYNGTSMASPHVAGAAALIKAKYPSLSASQIRDRLRNTATYLGDPFYYGNGVINVERALQ

SEQ ID NO: 68580 - protein, 275 aa, Bacillus subtilis
AQVTPWGITHINAHKAHSSSVTGSGVKVAVLDTGIDASHPDLNVKGGASFISGEPNALVDTNGHGTHVSGTVAALNNTIGVVGVAYNADLYAVKVLSASGSGTLSGIAQGVEWAIANNMDVINMSLGGSSGSTALKQAVDNAYASGIVVVAAAGNSGTRGRQNTMGYPARYSSVIAVGAVDSNNNRASFSSVGAELEVMAPGVSVLSTVPGGGYASYNGTSMASPHVAGAAALIKAKYPSLSASQIRDRLRNTATYLGPPFYYGNGVINVERALQ

SEQ ID NO: 68581 - protein, 275 aa, Bacillus subtilis
AQTTPWGITHINAHKAHSSSVTGSGVKVAVLDTGIDASHEDLNVKGGASFISGEPNALVDTNGHGTHVAGTVAALNNTIGVVGVAYNADLYAVKVLSASGSGTLSGIAQGVEWAIANNMDVINMSLGGSSGSTALKQAVDNAYASGIVVVAAAGNSGTRGRQNTMQYPARYSSVIAVGAVDSNNNRASFSSVGAELEVMAPGVSVLSTVPGGGYASYNGTSMASPHVAGAAALIKAKYPSLSASQIRDRLRNTATYLGDPFYYGNGVINVERALQ

SEQ ID NO: 68582 - protein, 275 aa, Bacillus subtilis
AQTTPWGIEHINAHKAHSSSVTGSGVKVAVLDTGIDASHPDLNVKGGASFISGEPNALVDTNGHGTHVSGTVAALNNTIGVVGVAYNADLYAVKVLSASGSGTLSGIAQGVEWAIANNMDVINMSLGGSSGSTALKQAVDNAYASGIVVVAAAGNSGTRGRQNTMGYPARYSSVIAVGAVDSNNNRASFSSVGAELEVMAPGVSVLSTVPGGGYASYSGTSMASPHVAGAAALIKAKYPSLSASQIRDRLRNTATYLGDPFYYGNGVINVERALQ

SEQ ID NO: 68583 - protein, 275 aa, Bacillus subtilis
AQTTPWGITHINAHKAHSSSVTGSGVKVAVLDTGIDASHPDLNVKGGASFISGEPNALVDTNGHGTHVAGTVAALNNNIGVVGVAYNADLYAVKVLSASGSGTLSGIAQGVEWAIANNMDVINMSLGGSSGSTALKQAVDNAYASGIVVVAAAGNSGTRGRQNTMQYPARYSSVIAVGAVDSNNNRASFSSVGAELEVMAPGVSVLSTVPGGGYASYNGTSMASPHVAGAAALIKAKYPSLSASQIRDRLRNTATYLGDPFYYGNGVINVERALQ

SEQ ID NO: 68584 - protein, 275 aa, Bacillus sp. LG1
AQTVPWGIPHIKADKAHAAGVTGSGVKVAILDTGIDANHPDLNVKGGASFVSGEPNALQDGNGHGTHVAGTVAALNNTTGVLGVAYNADLYAVKVLSASGSGTLSGIAQGIEWSISNGMNVINMSLGGSSGSTALQQACNNAYNRGIVVIAAAGNSGSSGNRNTMGYPARYSSVIAVGAVSSNNTRASFSSVGSELEVMAPGVNILSTTPGNNYASFNGTSMAAPHVAGAAALIKAKYPSMTNVQIRERLKNTATNLGDPFFYGKGVINVESALQ

SEQ ID NO: 68585 - protein, 275 aa, Bacillus subtilis
AQTTPWGITHINAHKAHSSSVTGSGVKVAVLDTGIDASHPDLNVKGGASFISGEPNALVDTNGHGTHVSGTVAALDNNIGVVGVAYNADLYAVKVLSASGSGTLSGIAQGVEWAIANNMDVINMSLGGSSGSTALKQAVDNAYASGIVVVAAAGNSGTRGRQNTMGYPARYSSVIAVGAVDSNNQRASFSSVGAELEVMAPGVSVLSTVPGGGYASYNGTSMASPHVAGAAALIKAKYPSLSASQIRDRLRNTATYLGDPFYYGNGVINVERALQ

SEQ ID NO: 68586 - protein, 275 aa, Bacillus sp. LG1
AQTVPWGIPHIKADKAHAAGVTGSGVKVAILDTGIDANHADLNVKGGASFVSGEPNATQDGNGHGTHVAGTVAALNNTTGVLGVAYNADLYAVKVLSASGSGTLSGIAQGIEWSISNGMNVINMSLGGSSGSTALQQACNNAYNRGIVVIAAAGNSGSSGNRNTMGYPARYSSVIAVGAVSSNNTRASFSSVGSELEVMAPGVNILSTTPGNNYASFNGTSMAAPHVAGAAALIKAKYPSMTNVQIRERLKNTATNLGDPFFYGKGVINVESALQ

SEQ ID NO: 68587 - protein, 275 aa, Bacillus subtilis
AQTTPWGITHINAHKAHSSSVTGSGVKVAVLDTGIDASHEDLNVKGGASFISGEPNALVDTNGHGTHVAGTVAALNNTIGVVGVAYNADLYAVKVLSASGSGTLSGIAQGVEWAIANNMDVINISLGGSSGSTALKQAVDNAYASGIVVVAAAGNSGTRGRQNTMGYPARYSSVIAVGAVDSNNNRASFSSVGAELEVMAPGVSVLSTVPGGGYASYNGTSMASPHVAGAAALIKAKYPSLSASQIRDRLRNTATYLGDPFYYGNGVINVERALQ

SEQ ID NO: 68588 - protein, 275 aa, Bacillus subtilis
AQSVPYGISQIKAPALHSQGYTGSNVKVAVIDSGIDSSHPDLNVRGGASFVPSETNPYQDGSSHGTHVAGTIAALNNSIGVLGVAPSASLYAVKVLDSTGSGQYSWIINGIEWAISNNMDVINMSLGGPTGSTALKTVVDKAVSSGIVVVAAAGNEGSSGSTSTVGYPAKYPSTIAVGAVNSSNQRASFSSAGSELDVMAPGVSIQSTLPGGTYGAYNGTSMATPHVAGAAALILSKHPTWTNAQVRNRLESTATYLGNSFYYGKGLINVQAAAQ

SEQ ID NO: 68589 - protein, 275 aa, Bacillus subtilis
AQSVPYGISQIKAPALHSQGYTGSNVKVAVIDSGIDSSHPDLNVRGGASFVPSETNPYQDGSSHGTHVAGTIAALNNSIGVLGVAPSASLYAVKVLDSTGSGQYSWIINGIEWAISNNMDVINMSLGGPSGSTALKTVVDKAVSSGIVVAAAAGNEGSSGSTSTVGYPAKYPSTIAVGAVNSSNQRASFSSVGSELDVMAPGVSIQSTLPGGTYGAYNGTSMATPHVAGAAALILSKHPTWTNAQVRDRLESTATYLGNSFYYGKGLINVQAAAQ

SEQ ID NO: 68590 - protein, 274 aa, Bacillus pumilus
AQTVPYGITQIKAPAVHAQGYKGANVKVAVLDTGIHAAHPDLNVAGGASFVPSEPNATQDFQSHGTHVAGTIAALDNTIGVLGVAPSAALYAVKVLDRNGDGQYSWIISGIEWAVANNMDVINMSLGGPDGSAALKNAVDTANKRGVVVVAAAGNSGSTGSTSTVGYPAKYDSTIAVANVNSSNVRNSTSSAGPELDVSAPGTSILSTVPSSGYTSMTGTSMAAPHVAGAAALILSKNPNLSNSQVRQRLETTATPLGNSFYYGKGLINAEAAS

SEQ ID NO: 68591 - protein, 275 aa, Bacillus vallismortis
AQSVPYGISQIKAPALHSQGYTGSNVKVAVIDSGIDSSHPDLNVRGGASFVPSETNPYQDGSSHGTHVAGTVAALNNSIGVLGVAPNASLYAVKVLDSTGNGQYSWIINGIEWAISNKMDVINMSLGGPSGSTALKSVVDRAVASGIVVVAAAGNEGTSGSSSTIGYPAKYPSTIAVGAVNSSNQRGSFSSVGPELDVMAPGVSIQSTLPGGTYGSYNGTSMATPHVAGAAALILSKHPTWTNTQVRNRLESTTTYLGSSFYYGKGLINVQAAAQ

SEQ ID NO: 68592 - protein, 274 aa, Bacillus pumilus
AQKIPYGITQIKAPAVHAQGYKGANVKVAVLDTGIHAAHPDLNVAGGASFVPSEPNATQDFQSHGTHVAGTIAALDNTIGVLGVAPSASLYAVKVLDRNGDGQYSWIISGIEWAVANNMDVINMSLGGPDGSAALKNAVDTANKRGVVVVAAAGNSGSTGSTSTVGYPAKYDSTIAVANVNSSNVRNSSSSAGPELDVSAPGTSILSTVPSSGYTSYTGTSMASPHVAGAAALILSKNPNLSNSQVRQRLETTATPLGNSFYYGKGLINAEAAS

SEQ ID NO: 68593 - protein, 274 aa, Bacillus pumilus
AQTVPYGITQIKAPAVHAQGYKGANVKVAVLDTGIHAAHPDLNVAGGASFVPSEPNATQDFQSHGTHVAGTIAALDNTIGVLGVAPSASLYAVKVLDRNGDGQYSWIISGIEWAVANNMDVINMSLGGPDGSAALKNAVDTANKRGVVIVAAAGNSGSTGSTSTVMYPAKYDSTIAVANVNSSNVRNSSSSAGPELDVSAPGTSILSTVPSSGYTSMTGTSMASPHVAGAAALILSKNPNLSNSQVRQRLETTATPLGNSFYYGKGLINAEAAS

SEQ ID NO: 68594 - protein, 275 aa, Bacillus subtilis
AQSVPYGISQIKAPALHSQGYTGSNVKVAVIDSGIDSSHPDLNVKGGASFVPSETNPYQDGSSHGTHVAGTIAALNNTIGVLGVAPNASLYAVKVLDSTGSGQYSWIINGIEWAISNNMDVINMSLGGPSGSTALKTVVDKAVSSGIVVAAAAGNEGSSGSTSTVGYPAKYPSTIAVGAVNSSNQRASFSSAGSELDVMAPGVSIQSTLPGGTYGAYNGTSMATPHVAGAAALILSKHPTWTNAQVRDRLESTATYLGSSFYYGKGLINVQAAAQ

SEQ ID NO: 68595 - protein, 275 aa, Bacillus sp. LG1
AQTVPWGIPHIKADKAHAAGVTGSGVKVAILDTGIDANHADLNVKGGASFVSGIPNALQDGNGHGTHVAGTVAALNNTTGVLGVAYNADLYAVKVLSASGSGTLSGIAQGIEWSISNGMNVINMSLGGSSGSTALQQACNNAYNRGIVVIAAAGNSGSSGNRNTMGYPARYSSVIAVGAVSSNNTRASFSSVGSELEVMAPGVNILSTTPGNNYASFNGTSMAAPHVAGAAALIKAKYPSMTNVQIRERLKNTATNLGDPFFYGKGVINVESALQ

SEQ ID NO: 68596 - protein, 275 aa, Bacillus subtilis
AQSVPYGISQIKAPALHSQGYTGSNVKVAVIDSGIDSSHPDLNVRGGASFVPSETNPYQDGSSHGTHVAGTIAALNNSIGVLGVAPSASLYAVKVLDSTGSGQYSWIINGIEWAISNNMDVINMSLGGPTGSTALKTVVDKAVSSGIVVAAAAGNEGSSGSTSTVGYPAKYPSTIAVGAVNSSNQRASFSSVGSELDVMAPGVSIQSTLPGGTYGAYNGTSMATPHVAGAAALILSKHPTWTNAQVRDRLESTATYLGSSFYYGKGLINVQAAAQ

SEQ ID NO: 68597 - protein, 275 aa, Bacillus subtilis
AQSVPYGVSQIKAPALHSQGYTGSNVKVAVIDSGIDSSHPDLNVRGGASFVPSETNPYQDGNSHGTHVAGTVAALNNSIGVLGVAPSASLYAVKVLDSTGSGQYSWIINGIEWAISNNMDVINMSLGGPSGSTALKTVVDKAVSSGSIVAAAAGNEGSSGSSSTVGYPAKYPSVIAVGAVNSSNQRASFSSVGSELDVMAPGVSIQSTLPGGTYGAYNGTSMATPHVAGAAALILSKHPTWTNAQVRDRLESTATYLGDSFYYGKGLINVQAAAQ

SEQ ID NO: 68598 - protein, 275 aa, Bacillus sp. LG1
AQTVPWGIPHIKADKAHAAGVTGSGVKVAILDTGIDANHADLNVKGGASFVSGLPNALQDGNGHGTHVAGTVAALNNTTGVLGVAYNADLYAVKVLSASGSGTLSGIAQGIEWSISNGMNVINMSLGGSSGSTALQQACNNAYNRGIVVIAAAGNSGSSGNRNTMGYPARYSSVIAVGAVSSNNTRASFSSVGSELEVMAPGVNILSTTPGNNYASFNGTSMAAPHVAGAAALIKAKYPSMTNVQIRERLKNTATNLGDPFFYGKGVINVESALQ

SEQ ID NO: 68599 - protein, 274 aa, Bacillus pumilus
AQTVPWGITQIKAPAVHAQGYKGANVKVAVLDTGIHAAHPDLNVAGGASFVPSEPNATQDFQSHGTHVAGTIAALDNTIGVLGVAPSASLYAVKVLDRNGDGQYSWIISGIEWAVANNMDVINMSLGGPDGSAALKNAVDTANKRGVVVVAAAGNSGSTGSTSTVGYPAKYDSTIAVANVNSSNVRNSTSSAGPELDVSAPGTSILSTVPSSGYTSMTGTSMAAPHVAGAAALILSKNPNLSNSQVRQRLETTATPLGNSFYYGKGLINAEAAS

SEQ ID NO: 68600 - protein, 275 aa, Bacillus sp. LG1
AQTVPWGIPHIKADKAHAAGVTGSGVKVAILDTGIDANHADLNVKGGASFVSGFPNALQDGNGHGTHVAGTVAALNNTTGVLGVAYNADLYAVKVLSASGSGTLSGIAQGIEWSISNGMNVINMSLGGSSGSTALQQACNNAYNRGIVVIAAAGNSGSSGNRNTMGYPARYSSVIAVGAVSSNNTRASFSSVGSELEVMAPGVNILSTTPGNNYASFNGTSMAAPHVAGAAALIKAKYPSMTNVQIRERLKNTATNLGDPFFYGKGVINVESALQ

SEQ ID NO: 68601 - protein, 274 aa, Bacillus sp.
QTVPWGIPHIKADKAHAAGVTGSGVKVAILDTGIDANHADLNVKGGASFVAGEPNALQDGNGHGTHVAGTVAALDNTTGVLGVAPSVSLYAVKVLGASGSGSVSSIAQGLEWAGNNGMHVANLSLGSPSPSATLEQAVNSATSRGVLVVAASGNSGTSGNRNTMDYPARYSSVIAVGAVSSNNTRASFSSVGSELEVMAPGVNILSTYPGSTYATLNGTSMATPHVAGAAALIKAKYPSMTNVQIRNRLKNTATNLGDPFFYGKGVINVESALQ

SEQ ID NO: 68602 - protein, 274 aa, Bacillus pumilus
AQTVPYGIPQIKAPAVHAQGYKGANVKVAVLDTGIHAAHPDLNVAGGASFVPSEPNATQDFQSHGTHVAGTIAALDNTIGVLGVAPSAALYAVKVLDRNGDGQYSWIISGIEWAVANNMDVINMSLGGPNHSTALKNAVDTANNRGVVVVAAAGNSGSTGSTSTVGYPAKYDSTIAVANVNSSNVRNSTSSAGPELDVSAPGTSILSTVPSSGYTSYTGTSMAAPHVAGAAALILSKNPNLSNSQVRQRLENTATPLGNSFYYGKGLINAQAAS

SEQ ID NO: 68603 - protein, 275 aa, Bacillus sp. LG1
AQTVPWGIPHIKADKAHAAGVTGSGVKVAILDTGIDANHADLNVKGGASFVSGWPNALQDGNGHGTHVAGTVAALNNTTGVLGVAYNADLYAVKVLSASGSGTLSGIAQGIEWSISNGMNVINMSLGGSSGSTALQQACNNAYNRGIVVIAAAGNSGSSGNRNTMGYPARYSSVIAVGAVSSNNTRASFSSVGSELEVMAPGVNILSTTPGNNYASFNGTSMAAPHVAGAAALIKAKYPSMTNVQIRERLKNTATNLGDPFFYGKGVINVESALQ

SEQ ID NO: 68604 - protein, 381 aa, Bacillus sp.
KKLFTKVVASAALLLSISLTATSVSAEEQKKQYLIGFENQLQVTEFVESSDKGQSEMSLFAEVNDESIEMELLYEFEDIPVVSVELSPEDVKDLEKDPSITYIEEDIEVTITNQVTPWGITRVQAPTAWTRGYTGTGVRVAVLDTGISTHPDLNIRGGVSFVPGEPSYQDGNGHGTHVAGTIAALNNSIGVVGVAPNAELYAVKVLGANGSGSVSSIAQGLQWTAQNNIHVANLSLGSPVGSQTLELAVNQATNAGVLVVAATGNNGSGTVSYPARYANALAVGATDQNNNRASFSQYGTGLNIVAPGVGIQSTYPGNRYASLSGTSMATPHVAGVAALVKQKNPSWSNTQIRQHLTSTATSLGNSNQFGSGLVNAEAATR

SEQ ID NO: 68605 - protein, 269 aa, Unidentified
AQSIPWGIERIGTPAAQASGFTGSGVSVAVLDTGIDPHSDLNIQGGVSFVPGESGSDDGNGHGTHVAGTIAALDNDQGVLGVAPDVDLFAVKVLSASGSGSISSIAQGLEWTAENNIDVANLSLGSPSPSQTLEQAVNDATDSGVLVVAAAGNSGTSSLGYPARYDHAMAVGATDESDSLASFSQYGEGLDLVAPGVGVESTYPGGGYDSLSGTSMAAPHVAGAAALVKQKNPSWTNEQIRGHLNDTANDLGDSFRFGSGLLNVENAVQ

SEQ ID NO: 68606 - protein, 273 aa, Bacillus sp. LG1
AQTVPWGIPHIKADKAHAAGVTGSGVKVAILDTGIDANHADLNVKGGASFVSGEPNALQDGNGHGTHVAGTVAALNNTTGVLGVAYNADLYAVKVLSASGSGTLSGIAQGIEWSISNGMNVINMSLGGSSGSTALQQACNNAYNRGIVVIAAAGNSGSSGNRNTMGYPARYSSVIAVGAVSSNNTRASFSSVGSELEVMAPGVNILSTTPGNNYASFNGTSMAAPHVAGAAALIKAKYPSMTNVQIRERLKNTATNLGDPFFYGKGVINVESA

SEQ ID NO: 68607 - protein, 345 aa, Bacillus sp.
EETKKTYLIGFDAQEEVETFTNMVDSEIGALSEEEIDITYEFKEIPVVSAEMSEEEYAALLEDPSISYIEEDIEVTTMAQAIPWGISQISAPEAQIAGFTGEGVNVAVLDTGIEDHPDLNVQGGVSFVQGEPDYQDGNGHGTHVAGTIAALDNDEGVIGVAPNADLYAVKVLGANGSGSVSSIAQGLEWAGENGMDIANLSLGSSAPSATLEQAVDEATANGVLVVAASGNSGASSIGYPARYDNAMAVGATDQSDGLASFSQYGDGLDIVAPGVGIDSTYPGSSYDSLSGTSMATPHVAGAAALVKEKNPLWSNEQIRAHLNETATDLGDMYRFGNGLLNAHAA

SEQ ID NO: 68608 - protein, 385 aa, Unidentified
MRSKKLWISLLFALTLIFTMAFSNMSASAAEEKVKYLIGFEEEAELEAFTEEIDQVGVFSVEEQSVAEDTLDIDVDIIDEYDYIDVLAVELDPEDVDALSEEAGISFIEEDIELSIQQTVPWGITRVQAPAVHNRGITGSGVRVAILDSGISTHEDLNVRGGVSFVPGEPTTADLNGHGTHVAGTVAALNNSIGVVGVAPSADLYAVKVLGANGRGSVSGIAQGLEWAAANNMHIANMSLGSDAPSSTLERAVNYATSRDVLVIAATGNNGSGSVGYPARYANAMAVGATDQNNRRANFSQYGTGIDIVAPGVNVQSTYPGNRYVSMNGTSMATPHVAGAAALVKQRYPSWNATQIRNHLKNTATNLGNSSQFGSGLVNAEAATR

SEQ ID NO: 68609 - protein, 275 aa, Bacillus sp. LG1
AQTVPWGIPHIKADKAHAAGVTGSGVKVAILDTGIDANHADLNVKGGASFVSGEPNALQDGNGHGTHVAGTVAALNNTTGVLGVAYNADLYAVKVLSASGSGTLSGIAQGIEWSISNGMNVINMSLGGSSGSTALQQACNNAYNRGIVVIAAAGNSGSSGNRNTMGYPARYSSVIAVGAVSSNNTRASFSSVGSELEVMAPGVNILSTVPGNNYASFNGTSMAAPHVAGAAALIKAKYPSMTNVQIRERLKNTATNLGDPFFYGKGVINVESALQ

SEQ ID NO: 68610 - protein, 275 aa, Bacillus sp. LG1
AQTVPWGIPHIKADKAHAAGVTGSGVKVAILDTGIDANHADLNVKGGASFVSGEPLALQDGNGHGTHVAGTVAALNNTTGVLGVAYNADLYAVKVLSASGSGTLSGIAQGIEWSISNGMNVINMSLGGSSGSTALQQACNNAYNRGIVVIAAAGNSGSSGNRNTMGYPARYSSVIAVGAVSSNNTRASFSSVGSELEVMAPGVNILSTTPGNNYASFNGTSMAAPHVAGAAALIKAKYPSMTNVQIRERLKNTATNLGDPFFYGKGVINVESALQ

SEQ ID NO: 68611 - protein, 275 aa, Bacillus subtilis
AQTTPWGITHINAHKAHSSSVTGSGVKVAVLDTGIDASHPDLNVKGGASFISGEPNALVDTNGHGTHVSGTVAALNNTIGVVGVAYNADLYAVKVLSASGSGTLSGIAQGVEWAIANNMDVINMSLGGSSGSTALKQAVDNAYASGIVVVAAAGNSGTRGRQNTMQYPARYSSVIAVGAVDSNNNRASFSSVGAELEVMAPGVSVLSTVPGGGYASYSGTSMASPHVAGAAALIKAKYPSLSASQIRDRLRNTATYLGDPFYYGNGVINVERALQ

SEQ ID NO: 68612 - protein, 275 aa, Bacillus sp. LG1
AQTVPWGIPHIKADKAHAAGVTGSGVKVAILDTGIDANHADLNVKGGASFVSGEPNALQDGNGHGTHVAGTVAALNNTTGVLGVAYNADLYAVKVLSASGSGTLSGIAQGIEWSISNGMNVINMSLGGSSGSTALQQACNNAYNRGIVVIAAAGNSGSSGNRNTMGYPARYSSVIAVGAVSSNNTRASFSSVGSELEVMAPGVNILSTTPGNNYASFNGTSMAAPHVAGAAALIKAKYPSMTNVQIRERLKITATNLGDPFFYGKGVINVESALQ

SEQ ID NO: 68613 - protein, 275 aa, Bacillus sp. LG1
AQTVPWGIPHIKADKAHAAGVTGSGVKVAILDTGIDANHADLNVKGGASFVSGEPNALQDGNGHGTHVAGTVAALNNTTGVLGVAYNADLYAVKVLSFSGSGTLSGIAQGIEWSISNGMNVINMSLGGSSGSTALQQACNNAYNRGIVVIAAAGNSGSSGNRNTMGYPARYSSVIAVGAVSSNNTRASFSSVGSELEVMAPGVNILSTTPGNNYASFNGTSMAAPHVAGAAALIKAKYPSMTNVQIRERLKNTATNLGDPFFYGKGVINVESALQ

SEQ ID NO: 68614 - protein, 275 aa, Bacillus sp. LG1
AQTVPWGIPHIKADKAHAAGVTGSGVKVAILDTGIDANHADLNVKGGASFVSGEPNALQDGNGHGTHVAGTVAALNNTTGVLGVAYNADLYAVKVLSASGSGTLSGIAQGIEWSISNGMNVINMSLGGSSGSTALQQACNNAYNRGHVVIAAAGNSGSSGNRNTMGYPARYSSVIAVGAVSSNNTRASFSSVGSELEVMAPGVNILSTTPGNNYASFNGTSMAAPHVAGAAALIKAKYPSMTNVQIRERLKNTATNLGDPFFYGKGVINVESALQ

SEQ ID NO: 68615 - protein, 275 aa, Bacillus sp. LG1
AQTVPWGIPHIKADKAHAAGVTGSGVKVAILDTGIDANHADLNVKGGASFVSGEPNALQDGNGHGTHVAGTVAALNNTTGVLGVAYNADLYAVKVLSASGSGTLSGIAQGIEWSISNGMNVINMSLGGSSGSTALQQACNNAYNRGIVVIAAAGNSGSSGNRNTMGYPARYSSVIAVGAVSSNNTRASFSSVGSELEVMAPGVNILSTTPGNNYASFNGTSMAAPHVAGAAALIKAKYPPMTNVQIRERLKNTATNLGDPFFYGKGVINVESALQ

SEQ ID NO: 68616 - protein, 275 aa, Bacillus sp. LG1
AQTVPWGIPHIKADKAHAAGVTGSGVKVAILDTGIDANHADLNVKGGASFVSGEPNALQDGNGHGTHVAGTVAALNNTTGVLGVAYNADLYAVKVLSASGSGTLSGIAQGIEWSISNGMNVINMSLGGSSGSTALQQACNNAYNRGIVVIAAAGNSGSSGNRNTMGYPARYSSVIAVGAVSSNNTRASFSSVGSELEVMAPGVNILSTTPGNNYASVNGTSMAAPHVAGAAALIKAKYPSMTNVQIRERLKNTATNLGDPFFYGKGVINVESALQ

SEQ ID NO: 68617 - protein, 275 aa, Bacillus sp. LG1
AQTVPWGIPHIKADKAHAAGVTGSGVKVAILDTGIDANHADLNVKGGASFVSGEPNALQDGNGHGTHVAGTVAALNNTTGVLGVAYNADLYAVKVLSASGSGTLSGIAQGIEWSISNGMNVINMSLGGSSGSTALQQACNNAYNRGIVVIAAAGNSGSSGNRNTMGYPARYSSVIAVGAVKSNNTRASFSSVGSELEVMAPGVNILSTTPGNNYASFNGTSMAAPHVAGAAALIKAKYPSMTNVQIRERLKNTATNLGDPFFYGKGVINVESALQ

SEQ ID NO: 68618 - protein, 274 aa, Bacillus sp.
AQTVPWGIPHIKADKAHAAGVTGSGVKVAILDTGIDANHADLNVKGGASFVSGENALQDGNGHGTHVAGTVAALNNTTGVLGVAYNADLYAVKVLSASGSGTLSGIAQGIEWSISNGMNVINMSLGGSSGSTALQQACNNAYNRGIVVIAAAGNSGSSGNRNTMGYPARYSSVIAVGAVSSNNTRASFSSVGSELEVMAPGVNILSTTPGNNYASFNGTSMAAPHVAGAAALIKAKYPSMTNVQIRERLKNTATNLGDPFFYGKGVINVESALQ

SEQ ID NO: 68619 - protein, 275 aa, Bacillus sp. LG1
AQTVPWGIPHIKADKAHAAGVTGSGVKVAILDTGIDANHADLNVKGGASFVSGEPNALQDGNGHGTHVAGTVAALNNTTGVLGVAYNADLYAVKVLSASGSGTLSGIAQGIEWSISNGMNVINMSLGGSSGSTALQQACNNAYNRGIVVIAAAGNSGSSGNRNTMGYPARYSSVIAVGAVSSNNTRASFSSVGSELEVMAPGVNILSTTPGNNYASFNGTSMAAPHVAGAAALIKAKYPSSTNVQIRERLKNTATNLGDPFFYGKGVINVESALQ

SEQ ID NO: 68620 - protein, 275 aa, Bacillus sp. LG1
AQTVPWGIPHIKADKAHAAGVTGSGVKVAILDTGIDANHADLNVKGGASFVSGEPIALQDGNGHGTHVAGTVAALNNTTGVLGVAYNADLYAVKVLSASGSGTLSGIAQGIEWSISNGMNVINMSLGGSSGSTALQQACNNAYNRGIVVIAAAGNSGSSGNRNTMGYPARYSSVIAVGAVSSNNTRASFSSVGSELEVMAPGVNILSTTPGNNYASFNGTSMAAPHVAGAAALIKAKYPSMTNVQIRERLKNTATNLGDPFFYGKGVINVESALQ

SEQ ID NO: 68621 - protein, 275 aa, Bacillus sp. LG1
AQTVPWGIPHIKADKAHAAGVTGHGVKVAILDTGIDANHADLNVKGGASFVSGEPNALQDGNGHGTHVAGTVAALNNTTGVLGVAYNADLYAVKVLSASGSGTLSGIAQGIEWSISNGMNVINMSLGGSSGSTALQQACNNAYNRGIVVIAAAGNSGSSGNRNTMGYPARYSSVIAVGAVSSNNTRASFSSVGSELEVMAPGVNILSTTPGNNYASFNGTSMAAPHVAGAAALIKAKYPSMTNVQIRERLKNTATNLGDPFFYGKGVINVESALQ

SEQ ID NO: 68622 - protein, 275 aa, Bacillus subtilis
AQTTPWGITHINAHKAHSSSVTGSGVKVAVLDTGIDASHEDLNVKGGASFISGEPNALVDTNGHGTHVAGTVAALNNTIGVVGVAYNADLYAVKVLSASGSGTLSGIAQGVEWAIANNMDVINMSLGGSSGSTALKQAVDNAYASGIVVVAAAGNSGTRGRQNTMGYPARYSSVIAVGAVDSNNQRASFSSVGAELEVMAPGVSVLSTVPGGGYASYSGTSMASPHVAGAAALIKAKYPSLSASQIRDRLRNTATYLGDPFYYGNGVINVERALQ

SEQ ID NO: 68623 - protein, 275 aa, Bacillus sp. LG1
AQTVPWGIPHIKADKAHAAGVTGSGVKVAILDTGIDANHADLNVKGGASFVSGEPNALQDGNGHGTHVAGTVAALNNTTGVLGVAYNADLYAVKVLSASGSGTLSGIAQGIEWSISNGMNVINMSLGGSSGSTALQQACNNAYNRGIVVIAAAGNSGSSGNRNTMGYPAIYSSVIAVGAVSSNNTRASFSSVGSELEVMAPGVNILSTTPGNNYASFNGTSMAAPHVAGAAALIKAKYPSMTNVQIRERLKNTATNLGDPFFYGKGVINVESALQ

SEQ ID NO: 68624 - protein, 275 aa, Bacillus sp. LG1
AQTVPWGIPHIKADKAHAAGMTGSGVKVAILDTGIDANHADLNVKGGASFVSGEPNALQDGNGHGTHVAGTVAALNNTTGVLGVAYNADLYAVKVLSASGSGTLSGIAQGIEWSISNGMNVINMSLGGSSGSTALQQACNNAYNRGIVVIAAAGNSGSSGNRNTMGYPARYSSVIAVGAVSSNNTRASFSSVGSELEVMAPGVNILSTTPGNNYASFNGTSMAAPHVAGAAALIKAKYPSMTNVQIRERLKNTATNLGDPFFYGKGVINVESALQ

SEQ ID NO: 68625 - protein, 275 aa, Bacillus sp. LG1
AQTVPWGIPHIKADKAHAAGVTGSGVKVAILDTGIDANHADLNVKGGASFVSGEPNALQDGNGHGTHVAGTVAALNNTTGVLGVAYNADLYAVKVLSASGSGTLSGIAQGIEWSISNGMNVINMSLGGSSGSTALQQACNNAYNRGIVVIAAAGNSGSSGNRNTMGYPARYSSVIAVGAVSSNNTRASFSSVGSELEVMAPGVNILSTTPGNNYASFNGTSMAAPHVAGAAALIKAKYPSMTRVQIRERLKNTATNLGDPFFYGKGVINVESALQ

SEQ ID NO: 68626 - protein, 275 aa, Bacillus sp. LG1
AQTVPWGIPHIKADKAHAAGVTGSGVKVAILDTGIDANHADLNVKGGASFVSGEPNALQDGNGHGTHVAGTVAALNNTTGVLGVAYNADLYAVKVLSASGSGTLSGIAQGIEWSISNGMNVINMSLGGSSGSTALQQACNNAYNRGIVVIAAAGNSGSSGNRNTMGYPARYSSVIAVGAVSSNNTRASFSSVGSELEVMAPGVNILSTTPGNNYASTNGTSMAAPHVAGAAALIKAKYPSMTNVQIRERLKNTATNLGDPFFYGKGVINVESALQ

SEQ ID NO: 68627 - protein, 275 aa, Bacillus sp. LG1
AQTVPWGIPHIKADKAHAAGVTGSGVKVAILDTGIDANHADLNVKGGASFVSGEPNALQDGNGHGTHVAGTVAALNNTTGVLGVAYNADLYAVKVLSASGSGTLSGIAQGIEWTISNGMNVINMSLGGSSGSTALQQACNNAYNRGIVVIAAAGNSGSSGNRNTMGYPARYSSVIAVGAVSSNNTRASFSSVGSELEVMAPGVNILSTTPGNNYASFNGTSMAAPHVAGAAALIKAKYPSMTNVQIRERLKNTATNLGDPFFYGKGVINVESALQ

SEQ ID NO: 68628 - protein, 275 aa, Bacillus subtilis
AQTTPWGITHINAHKAHSSSVTGSGVKVAVLDTGIDASHPDLNVKGGASFISGEPNALVDTNGHGTHVAGTVAALNNNIGVVGVAYNADLYAVKVLSASGSGTLSGIAQGVEWAIANNMDVINMSLGGSSGSTALKQAVDNAYASGIVVVAAAGNSGTRGRQNTMGYPARYSSVIAVGAVDSNNQRASFSSVGAELEVMAPGVSVLSTVPGGGYASYSGTSMASPHVAGAAALIKAKYPSLSASQIRDRLRNTATYLGPPFYYGNGVINVERALQ

SEQ ID NO: 68629 - protein, 275 aa, Bacillus sp. LG1
AQTVPWGIPHIKADKAHAAGVTGSGVKVAILDTGIDANHADLNVKGGASFVSGEPNALQDGNGHGTHVAGTVAALNNTTGVLGVAYNADLYAVKVLSASGSGTLSGIAQGIEWSISNGMNVINMSLGGSSGSTALQQACNNAYNRGIVVIAAAGNSGSSGNRNTMGYPARYSSVIAVGAVSSNNTRASFSSVGSELEVMAPGVNILSTTPGNMYASFNGTSMAAPHVAGAAALIKAKYPSMTNVQIRERLKNTATNLGDPFFYGKGVINVESALQ

SEQ ID NO: 68630 - protein, 275 aa, Bacillus sp. LG1
AQTVPWGIPHIKADKAHAAGVTGSGVKVAILDTGIDANHADLNVKGGASFVSGEPNRLQDGNGHGTHVAGTVAALNNTTGVLGVAYNADLYAVKVLSASGSGTLSGIAQGIEWSISNGMNVINMSLGGSSGSTALQQACNNAYNRGIVVIAAAGNSGSSGNRNTMGYPARYSSVIAVGAVSSNNTRASFSSVGSELEVMAPGVNILSTTPGNNYASFNGTSMAAPHVAGAAALIKAKYPSMTNVQIRERLKNTATNLGDPFFYGKGVINVESALQ

SEQ ID NO: 68631 - protein, 275 aa, Bacillus sp. LG1
AQTVPWGIPHIKADKAHAAGVTGSGVKVAILDTGIDANHADLNVKGGASFVSGEPNALQDGNGHGTHVAGTVAALNNTTGVLGVAYNADLYAVKVLSASGSGTLSGIAQGIEWSISNGMNVINMSLGGSSGSTALQQACNNAYNRGIVVIAAAGNSGSSGNRNTMGYPARYSSVIAVGAVSSNNTRASFSSVGSELEVMAPGVNILSTTPGNNYASFNGTSMAAPHVAGAAALIKAKYPSMTNVQIRERLKNTATNLGDCFFYGKGVINVESALQ

SEQ ID NO: 68632 - protein, 275 aa, Bacillus sp. LG1
AQTVPWGIPHIKADKAHAAGVTGSGVKVAILDTGIDANHADLNVKGGASFVSGEPNALQDGNGHGTHVAGTVAALNNTTGVLGVAYNADLYAVKVLSASGSGTLSGIAQGIEWSISNGMNVINMSLGGSSGSTALQQACNNAYNRGIVVAAAAGNSGSSGNRNTMGYPARYSSVIAVGAVSSNNTRASFSSVGSELEVMAPGVNILSTTPGNNYASFNGTSMAAPHVAGAAALIKAKYPSMTNVQIRERLKNTATNLGDPFFYGKGVINVESALQ

SEQ ID NO: 68633 - protein, 275 aa, Bacillus sp. LG1
AQTVPWGIPHIKADKAHAAGVTGSGVKVAILDTGIDANHADLNVKGGASFVSGEPNALQDGNGHGTHVAGTVAALNNTTGVLGVAYNADLYAVKVLSASGSGTLSGIAQGIEWSISNGMNVINMSLGGSSGSTALQQACNNAYNRGIVVIAAAGNSGSSGNRNTMGYPARYSSVIAVGAVSSNNTRASFSSVGSELEVMAPGVNILSTTPGNNYASFNGTSMAAPHVAGAAALIKAKYPSMENVQIRERLKNTATNLGDPFFYGKGVINVESALQ

SEQ ID NO: 68634 - protein, 275 aa, Bacillus sp. LG1
AQTVPWGIPHIKADKAHAAGVTGSGVKVAILDTGIDANHADLNVKGGASFVSGEPNALQDGNGHGTHVAGTVAALNNTTGVLGVAYNADLYAVKVLSASGSGTLSGIAQGIEWSISNGMNVINMSLGGSSGSTALQQACNNAYNRGIVVIAAAGNSGSSGNRNTMGYPARYSSVIAVGAVSSNNTRASFSSVGSELEVMAPGVNILSTTPGNNYASENGTSMAAPHVAGAAALIKAKYPSMTNVQIRERLKNTATNLGDPFFYGKGVINVESALQ

SEQ ID NO: 68635 - protein, 275 aa, Bacillus sp. LG1
AQTVPWGIPHIKADKAHAAGVTGSGVKVAILDTGIDANHADLNVKGGASFVSGEPNALQDGNGHGTHVAGTVAALNNTTGVLGVAYNADLYAVKVLSVSGSGTLSGIAQGIEWSISNGMNVINMSLGGSSGSTALQQACNNAYNRGIVVIAAAGNSGSSGNRNTMGYPARYSSVIAVGAVSSNNTRASFSSVGSELEVMAPGVNILSTTPGNNYASFNGTSMAAPHVAGAAALIKAKYPSMTNVQIRERLKNTATNLGDPFFYGKGVINVESALQ

SEQ ID NO: 68636 - protein, 275 aa, Bacillus sp. LG1
AQTVPWGIPHIKADKAHAAGVTGSGVKVAILDTGIDANHADLNVKGGASFVSGEPNALQDGNGHGTHVAGTVAALNNTTGVLGVAYNADLYAVKVLSASGSGTLSGIAQGIEWSISNGMNVINMSLGGSSGSTALQQACNNAYNRGIVVIAAAGNSGSSGNRNTMGYPARYSSVIAVGAVSSNNTRASFSSVGSELEVMAPGVNIFSTTPGNNYASFNGTSMAAPHVAGAAALIKAKYPSMTNVQIRERLKNTATNLGDPFFYGKGVINVESALQ

SEQ ID NO: 68637 - protein, 275 aa, Bacillus sp. LG1
AQTVPWGIPHIKADKAHAAGRTGSGVKVAILDTGIDANHADLNVKGGASFVSGEPNALQDGNGHGTHVAGTVAALNNTTGVLGVAYNADLYAVKVLSASGSGTLSGIAQGIEWSISNGMNVINMSLGGSSGSTALQQACNNAYNRGIVVIAAAGNSGSSGNRNTMGYPARYSSVIAVGAVSSNNTRASFSSVGSELEVMAPGVNILSTTPGNNYASFNGTSMAAPHVAGAAALIKAKYPSMTNVQIRERLKNTATNLGDPFFYGKGVINVESALQ

SEQ ID NO: 68638 - protein, 275 aa, Bacillus sp. LG1
AQTVPWGIPHIKADKAHAAGVRGSGVKVAILDTGIDANHADLNVKGGASFVSGEPNALQDGNGHGTHVAGTVAALNNTTGVLGVAYNADLYAVKVLSASGSGTLSGIAQGIEWSISNGMNVINMSLGGSSGSTALQQACNNAYNRGIVVIAAAGNSGSSGNRNTMGYPARYSSVIAVGAVSSNNTRASFSSVGSELEVMAPGVNILSTTPGNNYASFNGTSMAAPHVAGAAALIKAKYPSMTNVQIRERLKNTATNLGDPFFYGKGVINVESALQ

SEQ ID NO: 68639 - protein, 275 aa, Bacillus sp. LG1
AQTVPWGIPHIKADKAHAAGVTGSGVKVAILDTGIDANHADLNVKGGASFVSGEPNALQDGNGHGTHVAGTVAALTNTTGVLGVAYNADLYAVKVLSASGSGTLSGIAQGIEWSISNGMNVINMSLGGSSGSTALQQACNNAYNRGIVVIAAAGNSGSSGNRNTMGYPARYSSVIAVGAVSSNNTRASFSSVGSELEVMAPGVNILSTTPGNNYASFNGTSMAAPHVAGAAALIKAKYPSMTNVQIRERLKNTATNLGDPFFYGKGVINVESALQ

SEQ ID NO: 68640 - protein, 275 aa, Bacillus sp. LG1
AQTVPWGIPHIKADKAHAAGVTGSGVKVAILDTGIDANHADLNVKGGASFVSGEPNALQDGNGHGTHVAGTVAALNNTTGVLGVAYPADLYAVKVLSASGSGTLSGIAQGIEWSISNGMNVINMSLGGSSGSTALQQACNNAYNRGIVVIAAAGNSGSSGNRNTMGYPARYSSVIAVGAVSSNNTRASFSSVGSELEVMAPGVNILSTTPGNNYASFNGTSMAAPHVAGAAALIKAKYPSMTNVQIRERLKNTATNLGDPFFYGKGVINVESALQ

SEQ ID NO: 68641 - protein, 275 aa, Bacillus sp. LG1
AQTVPWGIPHIKADKAHAAGVTGSGVKVAILDTGIDANHADLNVKGGASFVSGEPNALQDGNGHGTHVAGTVAALNNTTGVLGVAYNADLYAVKVLSASGSGNLSGIAQGIEWSISNGMNVINMSLGGSSGSTALQQACNNAYNRGIVVIAAAGNSGSSGNRNTMGYPARYSSVIAVGAVSSNNTRASFSSVGSELEVMAPGVNILSTTPGNNYASFNGTSMAAPHVAGAAALIKAKYPSMTNVQIRERLKNTATNLGDPFFYGKGVINVESALQ

SEQ ID NO: 68642 - protein, 275 aa, Bacillus sp. LG1
AQTVPWGIPHIKADKAHAAGVTGSGVKVAILDTGIDANHADLNVKGGASFVSGEPNALQDGNGHGTHVAGTVAALNNTTGVLGVAYNADLYAVKVLSASGSGTLSGIAQGIEWSISNGMNVINMSLGGSSGSTALQQACNNAYNRGIVVIAAAGNSGSSGNRNTMGYPARYSSVIAVGAVSSNNTRASFSSVGSELEVMAPGVNILSTTPGNNYASFNGTSMAAPHVAGAAALIKAKYPSMTNVQIRERLKNTATNLGDPFFYGKGYINVESALQ

SEQ ID NO: 68643 - protein, 275 aa, Bacillus sp. LG1
AQTVPWGIPHIKADKAHAAGVTGSGVKVAILDTGIDANHADLNVKGGASFVSGEPNALQDGNGHGTHVAGTVAALNNTTGVLGVAYNADLYAVKVLSASGSGTLSGIAQGIEWSISNGMNVINMSLGGSSGSTALQQACNNAYNRGIVVIAAAGNSGSSGNRNTMGYPARYSSVIAVGAVSSNNTRASFSSVGSELEVMAPGVNILSTTPGNNYASFNGTSMAAPHVAGAAALIKAKYPSMTNVQIRERLKNTATNLGDLFFYGKGVINVESALQ

SEQ ID NO: 68644 - protein, 275 aa, Bacillus sp. LG1
AQTVPWGIPHIKADKAHAAGVTGSGVKVAILDTGIDANHADLNVKGGASFVSGEPNALQDGNGHGTHVAGTVAALNNTTGVLGVAYNADLYAVKVLMASGSGTLSGIAQGIEWSISNGMNVINMSLGGSSGSTALQQACNNAYNRGIVVIAAAGNSGSSGNRNTMGYPARYSSVIAVGAVSSNNTRASFSSVGSELEVMAPGVNILSTTPGNNYASFNGTSMAAPHVAGAAALIKAKYPSMTNVQIRERLKNTATNLGDPFFYGKGVINVESALQ

SEQ ID NO: 68645 - protein, 275 aa, Bacillus subtilis
AQVTPWGITHINAHKAHSSSVTGSGVKVAVLDTGIDASHPDLNVKGGASFISGEPNALVDTNGHGTHVAGTVAALNNNIGVVGVAYNADLYAVKVLSASGSGTLSGIAQGVEWAIANNMDVINMSLGGSSGSTALKQAVDNAYASGIVVVAAAGNSGTRGRQNTMQYPARYSSVIAVGAVDSNNNRASFSSVGAELEVMAPGVSVLSTVPGGGYASYNGTSMASPHVAGAAALIKAKYPSLSASQIRDRLRNTATYLGDPFYYGNGVINVERALQ

SEQ ID NO: 68646 - protein, 275 aa, Bacillus subtilis
AQTTPWGITHINAHKAHSSSVTGSGVKVAVLDTGIDASHEDLNVKGGASFISGEPNALVDTNGHGTHVSGTVAALNNTIGVVGVAYNADLYAVKVLSASGSGTLSGIAQGVEWAIANNMDVINMSLGGSSGSTALKQAVDNAYASGIVVVAAAGNSGTRGRQNTMQYPARYSSVIAVGAVDSNNNRASFSSVGAELEVMAPGVSVLSTVPGGGYASYNGTSMASPHVAGAAALIKAKYPSLSASQIRDRLRNTATYLGPPFYYGNGVINVERALQ

SEQ ID NO: 68647 - protein, 275 aa, Bacillus sp. LG1
AQTVPWGIPHIKADKAHAAGVTGSGVKVAILDTGIDANHADLNVKGGASFVSGEPNALQDGNGHGTHVAGTVAALNNTTGVLGVAYNADLYAVKVLSASGSGTLSGIAQGIEWSISNGMNVINMSLGGSSGSTALQQACINAYNRGIVVIAAAGNSGSSGNRNTMGYPARYSSVIAVGAVSSNNTRASFSSVGSELEVMAPGVNILSTTPGNNYASFNGTSMAAPHVAGAAALIKAKYPSMTNVQIRERLKNTATNLGDPFFYGKGVINVESALQ

SEQ ID NO: 68648 - protein, 275 aa, Bacillus sp. LG1
AQTVPWGIPHIKADKAHAAGVTGSGVKVAILDTGIDANHADLNVKGGASFVSGEPNALQDGNGHGTHVAGTVAALNNTTGVLGVAYNADLYAVKVLSASGSGTLSGIAQGIEWSISNGMNVINMSLGGSSGSTALQQACNNAYNRGIVVIAAAGNSGSSGNRNTMGYPARYSSVIAVGAVSSNNTRASFSSVGSELEVMAPGVNILSTTPGNNYASFNGTSMAAPHVAGAAALIKAKYPSMTNVQIRERLKNTATNLGDPFFYGKGRINVESALQ

SEQ ID NO: 68649 - protein, 275 aa, Bacillus sp. LG1
AQTVPWGIPHIKADKAHAAGVTGSGVKVAILDTGIDANHADLNVKGGASFVSGEPNALQDGNGHGTHVAGTVAALNNTTGVLGVAYNADLYAVKVLSASGSGTLSGIAQGIEWSISNGMNVINMSLGGSSGSTALQQACNNAYNRGIVVIAAAGNSGSSGNRNTMGYPARYSSVIAVGAVSSNNTRASFSSVGSELEVMAPGVNILSTTPGNNYASFNGTSMAAPHVAGAAALIKAKYPSMTNVQIRERLCNTATNLGDPFFYGKGVINVESALQ

SEQ ID NO: 68650 - protein, 275 aa, Bacillus sp. LG1
AQTVPWGIPHIKADKAHAAGVTGSGVKVAILDTGIDANHADLNVKGGASFVSGEPNALQDGNGHGTHVAGTVAALNNTTGVLGVAKNADLYAVKVLSASGSGTLSGIAQGIEWSISNGMNVINMSLGGSSGSTALQQACNNAYNRGIVVIAAAGNSGSSGNRNTMGYPARYSSVIAVGAVSSNNTRASFSSVGSELEVMAPGVNILSTTPGNNYASFNGTSMAAPHVAGAAALIKAKYPSMTNVQIRERLKNTATNLGDPFFYGKGVINVESALQ

SEQ ID NO: 68651 - protein, 275 aa, Bacillus subtilis
AQVTPWGITHINAHKAHSSSVTGSGVKVAVLDTGIDASHEDLNVKGGASFISGEPNALVDTNGHGTHVAGTVAALNNTIGVVGVAYNADLYAVKVLSASGSGTLSGIAQGVEWAIANNMDVINMSLGGSSGSTALKQAVDNAYASGIVVVAAAGNSGTRGRQNTMGYPARYSSVIAVGAVDSNNQRASFSSVGAELEVMAPGVSVLSTVPGGGYASYNGTSMASPHVAGAAALIKAKYPSLSASQIRDRLRNTATYLGDPFYYGNGVINVERALQ

SEQ ID NO: 68652 - protein, 275 aa, Bacillus sp. LG1
AQTVPWGIPHIKADKAHAAGVTGSGVKVAILDTGIDANHVDLNVKGGASFVSGEPNALQDGNGHGTHVAGTVAALNNTTGVLGVAYNADLYAVKVLSASGSGTLSGIAQGIEWSISNGMNVINMSLGGSSGSTALQQACNNAYNRGIVVIAAAGNSGSSGNRNTMGYPARYSSVIAVGAVSSNNTRASFSSVGSELEVMAPGVNILSTTPGNNYASFNGTSMAAPHVAGAAALIKAKYPSMTNVQIRERLKNTATNLGDPFFYGKGVINVESALQ

SEQ ID NO: 68653 - protein, 275 aa, Bacillus sp. LG1
AQTVPWGIPHIKADKAHAAGVTGSGVKVAILDTGIDANHADLNVKGGASFVSGEPNALQDGNGHGTHVAGTVAALNNTTGVLGVAYNADLYAVKVLSPSGSGTLSGIAQGIEWSISNGMNVINMSLGGSSGSTALQQACNNAYNRGIVVIAAAGNSGSSGNRNTMGYPARYSSVIAVGAVSSNNTRASFSSVGSELEVMAPGVNILSTTPGNNYASFNGTSMAAPHVAGAAALIKAKYPSMTNVQIRERLKNTATNLGDPFFYGKGVINVESALQ

SEQ ID NO: 68654 - protein, 275 aa, Bacillus sp. LG1
AQTVPWGIPHIKADKAHAAGVTGSGVKVAILDTGIDANHADLNVKGGASFVSGEPNALQDGNGHGTHVAGTVAALNNTTGVLGVAYNADLYAVKVLSASGSGTLSGIAQGIEWSISNGMNVINMSLGGSSGSTALQQACNNAYNRGIVVIAAAGNSGSSGNRNTMGYPARYSSVIAVGAVSSNNTRASFSSVGSELEVMAPGVNILSTTPGNNYASFNGTSMAAPHVAGAAALIKAKYPSMTNVQIRMRLKNTATNLGDPFFYGKGVINVESALQ

SEQ ID NO: 68655 - protein, 275 aa, Bacillus sp. LG1
AQTVPWGIPHIKADKAHAAGVEGSGVKVAILDTGIDANHADLNVKGGASFVSGEPNALQDGNGHGTHVAGTVAALNNTTGVLGVAYNADLYAVKVLSASGSGTLSGIAQGIEWSISNGMNVINMSLGGSSGSTALQQACNNAYNRGIVVIAAAGNSGSSGNRNTMGYPARYSSVIAVGAVSSNNTRASFSSVGSELEVMAPGVNILSTTPGNNYASFNGTSMAAPHVAGAAALIKAKYPSMTNVQIRERLKNTATNLGDPFFYGKGVINVESALQ

SEQ ID NO: 68656 - protein, 275 aa, Bacillus sp. LG1
AQTVPWGIPHIKADKAHAAGVTGSGVKVAILDTGIDANHADLNVKGGASFVSGEPNALQDGNGHGTHVAGTVAALNNTTGVLGVAYNADLYAVKVLSASGSGTLSGIAQGIEWSISNGMNVINMSLGGSSGSTALQQACNNAYNRGIVVIAAAGNSGSSGNRNTMGYPARYSSVIAVGAVSSNNTRASFSSVGSELEVMAPGVNILSTWPGNNYASFNGTSMAAPHVAGAAALIKAKYPSMTNVQIRERLKNTATNLGDPFFYGKGVINVESALQ

SEQ ID NO: 68657 - protein, 275 aa, Bacillus sp. LG1
AQTVPWGIPHIKADKAHAAGVTGSGVKVAILDTGIDANHADLNVKGGASFVSGEPNALQDGNGHGTHVAGTVAALNNTTGVLGVAENADLYAVKVLSASGSGTLSGIAQGIEWSISNGMNVINMSLGGSSGSTALQQACNNAYNRGIVVIAAAGNSGSSGNRNTMGYPARYSSVIAVGAVSSNNTRASFSSVGSELEVMAPGVNILSTTPGNNYASFNGTSMAAPHVAGAAALIKAKYPSMTNVQIRERLKNTATNLGDPFFYGKGVINVESALQ

SEQ ID NO: 68658 - protein, 275 aa, Bacillus sp. LG1
AQTVPWGIPHIKADKAHAAGVTGSGVKVAILDTGIDANHADLNVKGGASFVSGEPNALQDGNGHGTHVAGTVAALNNTTGVLGVAYNADLYAVKVLSASGSGTLSGIAQGIEWSISNGMNVINMSLGGSSGSTALQQACNNAYNRGIVVIAAAGNSGSSGNRNTMGYPARYSSVIAVGAVSSNNTRASFSSVGSELEVMAPGVNILSTTPGNNYASFNGTSMAAPHVAGAAALIKAKYPSMTNVQIRERLTNTATNLGDPFFYGKGVINVESALQ

SEQ ID NO: 68659 - protein, 275 aa, Bacillus sp. LG1
AQTVPWGIPHIKADKAHAAGVTGSGVKVAILDTGIDANHADLNVKGGASFVSGEPNALQDGNGHGTHVAGTVAALNNTTGVLGVAYNADLYAVKVLSASGSGKLSGIAQGIEWSISNGMNVINMSLGGSSGSTALQQACNNAYNRGIVVIAAAGNSGSSGNRNTMGYPARYSSVIAVGAVSSNNTRASFSSVGSELEVMAPGVNILSTTPGNNYASFNGTSMAAPHVAGAAALIKAKYPSMTNVQIRERLKNTATNLGDPFFYGKGVINVESALQ

SEQ ID NO: 68660 - protein, 275 aa, Bacillus subtilis
AQTTPWGITHINAHKAHSSSVTGSGVKVAVLDTGIDASHEDLNVKGGASFISGEPNALVDTNGHGTHVAGTVAALNNNIGVVGVAYNADLYAVKVLSASGSGTLSGIAQGVEWAIANNMDVINMSLGGSSGSTALKQAVDNAYASGIVVVAAAGNSGTRGRQNTMGYPARYSSVIAVGAVDSNNNRASFSSVGAELEVMAPGVSVLSTVPGGGYASYSGTSMASPHVAGAAALIKAKYPSLSASQIRDRLRNTATYLGPPFYYGNGVINVERALQ

SEQ ID NO: 68661 - protein, 275 aa, Bacillus sp. LG1
AQTVPWGIPHIKADKAHAAGVTGSGVKVAILDTGIDANHADLNVKGGASFVRGEPNALQDGNGHGTHVAGTVAALNNTTGVLGVAYNADLYAVKVLSASGSGTLSGIAQGIEWSISNGMNVINMSLGGSSGSTALQQACNNAYNRGIVVIAAAGNSGSSGNRNTMGYPARYSSVIAVGAVSSNNTRASFSSVGSELEVMAPGVNILSTTPGNNYASFNGTSMAAPHVAGAAALIKAKYPSMTNVQIRERLKNTATNLGDPFFYGKGVINVESALQ

SEQ ID NO: 68662 - protein, 275 aa, Bacillus sp. LG1
AQTVPWGIPHIKADKEHAAGVTGSGVKVAILDTGIDANHADLNVKGGASFVSGEPNALQDGNGHGTHVAGTVAALNNTTGVLGVAYNADLYAVKVLSASGSGTLSGIAQGIEWSISNGMNVINMSLGGSSGSTALQQACNNAYNRGIVVIAAAGNSGSSGNRNTMGYPARYSSVIAVGAVSSNNTRASFSSVGSELEVMAPGVNILSTTPGNNYASFNGTSMAAPHVAGAAALIKAKYPSMTNVQIRERLKNTATNLGDPFFYGKGVINVESALQ

SEQ ID NO: 68663 - protein, 275 aa, Bacillus sp. LG1
AQTVPWGIPHIKADKAHAAGVIGSGVKVAILDTGIDANHADLNVKGGASFVSGEPNALQDGNGHGTHVAGTVAALNNTTGVLGVAYNADLYAVKVLSASGSGTLSGIAQGIEWSISNGMNVINMSLGGSSGSTALQQACNNAYNRGIVVIAAAGNSGSSGNRNTMGYPARYSSVIAVGAVSSNNTRASFSSVGSELEVMAPGVNILSTTPGNNYASFNGTSMAAPHVAGAAALIKAKYPSMTNVQIRERLKNTATNLGDPFFYGKGVINVESALQ

SEQ ID NO: 68664 - protein, 275 aa, Bacillus sp. LG1
AQTVPWGIPHIKADKAHAAGVTGSGVKVAILDTGIDANHYDLNVKGGASFVSGEPNALQDGNGHGTHVAGTVAALNNTTGVLGVAYNADLYAVKVLSASGSGTLSGIAQGIEWSISNGMNVINMSLGGSSGSTALQQACNNAYNRGIVVIAAAGNSGSSGNRNTMGYPARYSSVIAVGAVSSNNTRASFSSVGSELEVMAPGVNILSTTPGNNYASFNGTSMAAPHVAGAAALIKAKYPSMTNVQIRERLKNTATNLGDPFFYGKGVINVESALQ

SEQ ID NO: 68665 - protein, 275 aa, Bacillus sp. LG1
AQTVPWGIPHIKADKGHAAGVTGSGVKVAILDTGIDANHADLNVKGGASFVSGEPNALQDGNGHGTHVAGTVAALNNTTGVLGVAYNADLYAVKVLSASGSGTLSGIAQGIEWSISNGMNVINMSLGGSSGSTALQQACNNAYNRGIVVIAAAGNSGSSGNRNTMGYPARYSSVIAVGAVSSNNTRASFSSVGSELEVMAPGVNILSTTPGNNYASFNGTSMAAPHVAGAAALIKAKYPSMTNVQIRERLKNTATNLGDPFFYGKGVINVESALQ

SEQ ID NO: 68666 - protein, 275 aa, Bacillus sp. LG1
AQTVPWGIPHIKADKAHAAGVTGSGVKVAILDTGIDANHADLNVKGGASFVSGEPNALQDGNGHGTHVAGTVAALNNTTGVLGVAYNPDLYAVKVLSASGSGTLSGIAQGIEWSISNGMNVINMSLGGSSGSTALQQACNNAYNRGIVVIAAAGNSGSSGNRNTMGYPARYSSVIAVGAVSSNNTRASFSSVGSELEVMAPGVNILSTTPGNNYASFNGTSMAAPHVAGAAALIKAKYPSMTNVQIRERLKNTATNLGDPFFYGKGVINVESALQ

SEQ ID NO: 68667 - protein, 275 aa, Bacillus sp. LG1
AQTVPWGIPHIKADKAHAAGVTGSGVKVAILDTGIDANHADLNVKGGASFVSGEPNALQDGNGHGTHVAGTVAALNNTTGVLGVAYNADLYAVKVLSASGSGTLSGIAQGIEWSISNGMNVINMSLGGSSGSTALQQACNNAYNRGIVVSAAAGNSGSSGNRNTMGYPARYSSVIAVGAVSSNNTRASFSSVGSELEVMAPGVNILSTTPGNNYASFNGTSMAAPHVAGAAALIKAKYPSMTNVQIRERLKNTATNLGDPFFYGKGVINVESALQ

SEQ ID NO: 68668 - protein, 275 aa, Bacillus sp. LG1
AQTVPWGIPHIKADKAHAAGVTGSGVKVAILDTGIDANHADLNVKGGASFVSGEPNALQDGNGHGTHVAGTVAALNNTTGVLGVAYNADLYAVKVLSASGSGTLSGIAQGIEWSISNGMNVINMSLGGSSGSTALQQACNNAYNRGIVVIAAAGNSGSSGNRNTMGYPARYSSVIAVGAVSSNNTRASFSSVGSELEVMAPGVNILSTTPGNNYASFNGTSMAAPHVAGAAALIKAKYPSMTNVQIRERLNNTATNLGDPFFYGKGVINVESALQ

SEQ ID NO: 68669 - protein, 275 aa, Bacillus sp. LG1
AQTVPWGIPHIKADKAHAAGVTGSGVKVAILDTGIDANHADLNVKGGASFVSGEPNALQDGNGHGTHVAGTVAALNNTTGVLGVAYNADLYAVKVLSASGSGTLSGIAQGIEWSISNGMNVINMSLGGSSGSTALQQACNNAYNRGIVVIAAAGNSGSSGNRNTMGYPARYSSVIAVGAVSSNNTRASFSSVGSELEVMAPGVNILSTTPGNNYASFNGTSMAAPHVAGAAALIKAKYPSMGNVQIRERLKNTATNLGDPFFYGKGVINVESALQ

SEQ ID NO: 68670 - protein, 275 aa, Bacillus sp. LG1
AQTVPWGIPHIKADKAHAAGVTGSGVKVAILDTGIDANHADLNVKGGASFVSGEPNALQDGNGHGTHVAGTVAALNNTTGVLGVAYNADLYAVKVLSQSGSGTLSGIAQGIEWSISNGMNVINMSLGGSSGSTALQQACNNAYNRGIVVIAAAGNSGSSGNRNTMGYPARYSSVIAVGAVSSNNTRASFSSVGSELEVMAPGVNILSTTPGNNYASFNGTSMAAPHVAGAAALIKAKYPSMTNVQIRERLKNTATNLGDPFFYGKGVINVESALQ

SEQ ID NO: 68671 - protein, 275 aa, Bacillus sp. LG1
AQTVPWGIPHIKADKAHAAGVTGSGVKVAILDTGIDANHADLNVKGGASFVSGEPNALQDGNGHGTHVAGTVAALQNTTGVLGVAYNADLYAVKVLSASGSGTLSGIAQGIEWSISNGMNVINMSLGGSSGSTALQQACNNAYNRGIVVIAAAGNSGSSGNRNTMGYPARYSSVIAVGAVSSNNTRASFSSVGSELEVMAPGVNILSTTPGNNYASFNGTSMAAPHVAGAAALIKAKYPSMTNVQIRERLKNTATNLGDPFFYGKGVINVESALQ

SEQ ID NO: 68672 - protein, 275 aa, Bacillus sp. LG1
AQTVPWGIPHIKADKAHAAGVTGSGVKVAILDTGIDANHADLNVKGGASFVSGEPNALQDGNGHGTHVAGTVAALNNTTGVLGVAYNADLYAVKVLSASGSGTLSGIAQGIEWSISNGMNVINMSLGGSSGSTALQQACNNAYNRGIVVIAAAGNSGSSGNRNTMGYPARYSSVIAVGAVSSNNTRASFSSVGRELEVMAPGVNILSTTPGNNYASFNGTSMAAPHVAGAAALIKAKYPSMTNVQIRERLKNTATNLGDPFFYGKGVINVESALQ

SEQ ID NO: 68673 - protein, 275 aa, Bacillus sp. LG1
AQTVPWGIPHIKADKAHAAGVTGSGVKVAILDTGIDANHADLNVKGGASFVSGEPVALQDGNGHGTHVAGTVAALNNTTGVLGVAYNADLYAVKVLSASGSGTLSGIAQGIEWSISNGMNVINMSLGGSSGSTALQQACNNAYNRGIVVIAAAGNSGSSGNRNTMGYPARYSSVIAVGAVSSNNTRASFSSVGSELEVMAPGVNILSTTPGNNYASFNGTSMAAPHVAGAAALIKAKYPSMTNVQIRERLKNTATNLGDPFFYGKGVINVESALQ

SEQ ID NO: 68674 - protein, 275 aa, Bacillus sp. LG1
AQTVPWGIPHIKADKAHAAGVTGSGVKVAILDTGIDANHADLNVKGGASFVSGEPNALQDGNGHGTHVAGTVAALNNTTGVLGVAYNADLYAVKVLSASGSGTLSGIAQGIEWSISNGMNVINMSLGGSSGSTALQQACNNAYNRGIVVIAAAGNSGSSGNRNTMGYPARYSSVIAVGAVSSNNTRASFSSVGSELEVMAPGVNILSTTPGNNYASFNGTSMAAPHVAGAAALIKAKYPSMTNVQIRERLKETATNLGDPFFYGKGVINVESALQ

SEQ ID NO: 68675 - protein, 275 aa, Bacillus sp. LG1
AQTVPWGIPHIKADKAHAAGVTGSGVKVAILDTGIDANHRDLNVKGGASFVSGEPNALQDGNGHGTHVAGTVAALNNTTGVLGVAYNADLYAVKVLSASGSGTLSGIAQGIEWSISNGMNVINMSLGGSSGSTALQQACNNAYNRGIVVIAAAGNSGSSGNRNTMGYPARYSSVIAVGAVSSNNTRASFSSVGSELEVMAPGVNILSTTPGNNYASFNGTSMAAPHVAGAAALIKAKYPSMTNVQIRERLKNTATNLGDPFFYGKGVINVESALQ

SEQ ID NO: 68676 - protein, 275 aa, Bacillus sp. LG1
AQTVPWGIPHIKADKAHAAGVTGSGVKVAILDTGIDANHADLNVKGGASFVSGEPNALQDGNGHGTHVAGTVAALNNTTGVLGVAYNADLYAVKVLSASGSGTLSGIAQGIEWSISNGMNVINMSLGGQSGSTALQQACNNAYNRGIVVIAAAGNSGSSGNRNTMGYPARYSSVIAVGAVSSNNTRASFSSVGSELEVMAPGVNILSTTPGNNYASFNGTSMAAPHVAGAAALIKAKYPSMTNVQIRERLKNTATNLGDPFFYGKGVINVESALQ

SEQ ID NO: 68677 - protein, 275 aa, Bacillus sp. LG1
AQTVPWGIPHIKADKAHAAGVTGSGVKVAILDTGIDANHADLNVKGGASFVSGEPNALQDGNGHGTHVAGTVAALNNTTGVLGVAYNADLYAVKVLSASGSGTLSGIAQGIEWSISNGMNVINMSLGGSSGSTALQQACNNAYNRGIVVIAAAGNSGSSGNRNTMGYPARYSSVIAVGAVSSNNTRASFSSVGSELEVMAPGVNILSTTPGNNYASFNGTSMAAPHVAGAAALIKAKYPSMTNVQIRERLKNTATNLGDPFFYGKGFINVESALQ

SEQ ID NO: 68678 - protein, 275 aa, Bacillus sp. LG1
AQTVPWGIPHIKADKAHAAGKTGSGVKVAILDTGIDANHADLNVKGGASFVSGEPNALQDGNGHGTHVAGTVAALNNTTGVLGVAYNADLYAVKVLSASGSGTLSGIAQGIEWSISNGMNVINMSLGGSSGSTALQQACNNAYNRGIVVIAAAGNSGSSGNRNTMGYPARYSSVIAVGAVSSNNTRASFSSVGSELEVMAPGVNILSTTPGNNYASFNGTSMAAPHVAGAAALIKAKYPSMTNVQIRERLKNTATNLGDPFFYGKGVINVESALQ

SEQ ID NO: 68679 - protein, 275 aa, Bacillus sp. LG1
AQTVPWGIPHIKADKAHAAGVTGSGVKVAILDTGIDANHADLNVKGGASFVSGEPNALQDGNGHGTHVAGTVAALNNTTGVLGVAYNADLYAVKVLSASGSGTLSGIAQGIEWSISNGMNVINMSLGGSSGSTALQQACNNAYNRGIVVIAAAGNSGSSGNRNTMGYPARYSSVIAVGAVSSNNTRASFSSVGSELEVMAPGVNILSTTPGNNYASINGTSMAAPHVAGAAALIKAKYPSMTNVQIRERLKNTATNLGDPFFYGKGVINVESALQ

SEQ ID NO: 68680 - protein, 275 aa, Bacillus sp. LG1
AQTVPWGIPHIKADKAHAAGVTGSGVKVAILDTGIDANHDDLNVKGGASFVSGEPNALQDGNGHGTHVAGTVAALNNTTGVLGVAYNADLYAVKVLSASGSGTLSGIAQGIEWSISNGMNVINMSLGGSSGSTALQQACNNAYNRGIVVIAAAGNSGSSGNRNTMGYPARYSSVIAVGAVSSNNTRASFSSVGSELEVMAPGVNILSTTPGNNYASFNGTSMAAPHVAGAAALIKAKYPSMTNVQIRERLKNTATNLGDPFFYGKGVINVESALQ

SEQ ID NO: 68681 - protein, 275 aa, Bacillus sp. LG1
AQTVPWGIPHIKADKAHAAGVTGSGVKVAILDTGIDANHADLNVKGGASFVVGEPNALQDGNGHGTHVAGTVAALNNTTGVLGVAYNADLYAVKVLSASGSGTLSGIAQGIEWSISNGMNVINMSLGGSSGSTALQQACNNAYNRGIVVIAAAGNSGSSGNRNTMGYPARYSSVIAVGAVSSNNTRASFSSVGSELEVMAPGVNILSTTPGNNYASFNGTSMAAPHVAGAAALIKAKYPSMTNVQIRERLKNTATNLGDPFFYGKGVINVESALQ

SEQ ID NO: 68682 - protein, 275 aa, Bacillus sp. LG1
AQTVPWGIPHIKADKAHAAGVTGSGVKVAILDTGIDANHADLNVKGGASFVSGEPNALQDGNGHGTHVAGTVAALNNTTGVLGVAYNADLYAVKVLSASGSGTLSGIAQGIEWSISNGMNVINMSLGGSSGSTALQQACNNAYNRGIVVIAAAGNSGSSGNRNTMGYPARYSSVIAVGAVSSNNTRASFSSVGSELEVMAPGVNILSTTPGNNYASFNGTSMAAPHVAGAAALIKAKYPSWTNVQIRERLKNTATNLGDPFFYGKGVINVESALQ

SEQ ID NO: 68683 - protein, 275 aa, Bacillus sp. LG1
AQTVPWGIPHIKADKAHAAGVTGSGVKVAILDTGIDANHADLNVKGGASFVSGEPNALQDGNGHGTHVAGTVAALNNTTGVLGVAYNADLYAVKVLSKSGSGTLSGIAQGIEWSISNGMNVINMSLGGSSGSTALQQACNNAYNRGIVVIAAAGNSGSSGNRNTMGYPARYSSVIAVGAVSSNNTRASFSSVGSELEVMAPGVNILSTTPGNNYASFNGTSMAAPHVAGAAALIKAKYPSMTNVQIRERLKNTATNLGDPFFYGKGVINVESALQ

SEQ ID NO: 68684 - protein, 275 aa, Bacillus sp. LG1
AQTVPWGIPHIKADKAHAAGVTGSGVKVAILDTGIDANHADLNVKGGASFVSGEPNALQDGNGHGTHVAGTVAALNNTTGVLGVAYNADLYAVKVLSASGSGTLSGIAQGIEWSISNGMNVINMSLGGSSGSTALQQACNNAYNRGIVVIAAAGNSGSSGNRNTMGYPARYSSVIAVGAVSSNNTRASFSSVGSELEVMAPGVNILSTTPGNNYASFNGTSMAAPHVAGAAALIKAKYPSMTNVQIRCRLKNTATNLGDPFFYGKGVINVESALQ

SEQ ID NO: 68685 - protein, 275 aa, Bacillus sp. LG1
AQTVPWGIPHIKADKAHAAGVTGSGVKVAILDTGIDANHADLNVKGGASFVSGEPNALQDGNGHGTHVAGTVAALNNTTGVLGVAYNADLYAVKVLSASGSGTLSGIAQGIEWSISNGMNVINMSLGGSSGSTALQQACNNAYNRGIVVIAAAGNSGSSGNRNTMGYPARYSSVIAVGAVSSNNTRASFSSVGSELEVMAPGVNILSTTPGNNYASFNGTSMAAPHVAGAAALIKAKYPSMTNVQIRERLKNTATVLGDPFFYGKGVINVESALQ

SEQ ID NO: 68686 - protein, 275 aa, Bacillus sp. LG1
AQTVPWGIPHIKADKAHAAGVGGSGVKVAILDTGIDANHADLNVKGGASFVSGEPNALQDGNGHGTHVAGTVAALNNTTGVLGVAYNADLYAVKVLSASGSGTLSGIAQGIEWSISNGMNVINMSLGGSSGSTALQQACNNAYNRGIVVIAAAGNSGSSGNRNTMGYPARYSSVIAVGAVSSNNTRASFSSVGSELEVMAPGVNILSTTPGNNYASFNGTSMAAPHVAGAAALIKAKYPSMTNVQIRERLKNTATNLGDPFFYGKGVINVESALQ

SEQ ID NO: 68687 - protein, 275 aa, Bacillus sp. LG1
AQTVPWGIPHIKADKAHAAGVTGSGVKVAILDTGIDANHADLNVKGGASFVSGEPNALQDGNGHGTHVAGTVAALNNTTGVLGVAYNADLYAVKVLSASGSGTLSGIAQGIEWSISNGMNVINMSLGGSSGSTALQQACNNAYNRGIVVIAAAGNSGSSGNRNTMGYPARYSSVIAVGAVASNNTRASFSSVGSELEVMAPGVNILSTTPGNNYASFNGTSMAAPHVAGAAALIKAKYPSMTNVQIRERLKNTATNLGDPFFYGKGVINVESALQ

SEQ ID NO: 68688 - protein, 275 aa, Bacillus sp. LG1
AQTVPWGIPHIKADKAHAAGVTGSGVKVAILDTGIDANHADLNVKGGASFVSGEPNALQDGNGHGTHVAGTVAALNNTTGVLGVAYNADLYAVKVLSASGSGTLSGIAQGIEWSISNGMNVINMSLGGSSGSTALQQACNNAYNRGIVVIAAAGNSGSSGNRNTMGYPARYSSVIAVGAVSSNNTRASFSSVGSELEVMAPGVNILSTTPGNNYASFNGTSMAAPHVAGAAALIKAKYPSMTNVQIRERLKNTATNLGDPFFYGKGSINVESALQ

SEQ ID NO: 68689 - protein, 275 aa, Bacillus sp. LG1
AQTVPWGIPHIKADKAHAAGVTGSGVKVAILDTGIDANHADLNVKGGASFVSGEPNALQDGNGHGTHVAGTVAALNNTTGVLGVAYNADLYAVKVLSASGSGTLSGIAQGIEWSISNGMNVINMSLGGSSGSTALQQACNNAYNRGIVVIAAAGNSGSSGNRNTMGYPARYSSVIAVGAVSSNNTRASFSSVGSELEVMAPGVNILSTTPGNNYASFNGTSMAAPHVAGAAALIKAKMPSMTNVQIRERLKNTATNLGDPFFYGKGVINVESALQ

SEQ ID NO: 68690 - protein, 275 aa, Bacillus sp. LG1
AQTVPWGIPHIKADKAHAAGVTGSGVKVAILDTGIDAYHADLNVKGGASFVSGEPNALQDGNGHGTHVAGTVAALNNTTGVLGVAYNADLYAVKVLSASGSGTLSGIAQGIEWSISNGMNVINMSLGGSSGSTALQQACNNAYNRGIVVIAAAGNSGSSGNRNTMGYPARYSSVIAVGAVSSNNTRASFSSVGSELEVMAPGVNILSTTPGNNYASFNGTSMAAPHVAGAAALIKAKYPSMTNVQIRERLKNTATNLGDPFFYGKGVINVESALQ

SEQ ID NO: 68691 - protein, 275 aa, Bacillus sp. LG1
AQTVPWGIPHIKADKAHAAGVTGSGVKVAILDTGIDANHADLNVKGGASFVSGEPNALQDGNGHGTHVAGTVAALNNTTGVLGVAYFADLYAVKVLSASGSGTLSGIAQGIEWSISNGMNVINMSLGGSSGSTALQQACNNAYNRGIVVIAAAGNSGSSGNRNTMGYPARYSSVIAVGAVSSNNTRASFSSVGSELEVMAPGVNILSTTPGNNYASFNGTSMAAPHVAGAAALIKAKYPSMTNVQIRERLKNTATNLGDPFFYGKGVINVESALQ

SEQ ID NO: 68692 - protein, 275 aa, Bacillus sp. LG1
AQTVPWGIPHIKADKAHAAGVTGSGVKVAILDTGIDANHADLNVKGGASFVSGEPNALQDGNGHGTHVAGTVAALNNTTGVLGVAYNADLYAVKVLSASGSGTLSGIAQGIEWSISNGMNVINMSLGGSSGSTALQQACNNAYNRGIVVIAAAGNSGSSGNRNTMGYPARYSSVIAVGAVSSNNTRASFSSVGSELEVMAPGVNILSTTPGNNYASFNGTSMAAPHVAGAAALIKAKYPSMTNVQIRERLKNTATNLGDPFIYGKGVINVESALQ

SEQ ID NO: 68693 - protein, 275 aa, Bacillus sp. LG1
AQTVPWGIPHIKADKAHAAGVTGSGVKVAILDTGIDANHADLNVRGGASFVSGEPNALQDGNGHGTHVAGTVAALNNTTGVLGVAYNADLYAVKVLSASGSGTLSGIAQGIEWSISNGMNVINMSLGGSSGSTALQQACNNAYNRGIVVIAAAGNSGSSGNRNTMGYPARYSSVIAVGAVSSNNTRASFSSVGSELEVMAPGVNILSTTPGNNYASFNGTSMAAPHVAGAAALIKAKYPSMTNVQIRERLKNTATNLGDPFFYGKGVINVESALQ

SEQ ID NO: 68694 - protein, 275 aa, Bacillus sp. LG1
AQTVPWGIPHIKADKAHAAGVTGSGVKVAILDTGIDANHADLNVKGGASFVSGEPNALQDGNGHGTHVAGTVAALNNTTGVLGVAYNADLYAVKVLSASGSGTLSGIAQGIEWSISNGMNVINMSLGGSSGSTALQQACNNAYNRGIVVIAAAGNSGSSGNRNTMGYPARYSSVIAVGAVSSNNTRASFSSVGSELEVMAPGVNILSTTPGNNYASFNGTSMAAPHVAGAAALIKAKTPSMTNVQIRERLKNTATNLGDPFFYGKGVINVESALQ

SEQ ID NO: 68695 - protein, 275 aa, Bacillus sp. LG1
AQTVPWGIPHIKADKAHAAGVTGSGVKVAILDTGIDANHADLNVKGGASFVSGEPNALQDGNGHGTHVAGTVAALNNTTGVLGVAYNADLYAVKVLSASGSGTLSGIAQGIEWSISNGMNVINMSLGGSSGSTALQQACNNAYNRGIVVIAAAGNSGSSGNRNTMGYPARYSSVIAVGAVSSNNTRASFSSVGSELEVMAPGVNILSTTPGNNYASFNGTSMAAPHVAGAAALIKAKYPSMTNLQIRERLKNTATNLGDPFFYGKGVINVESALQ

SEQ ID NO: 68696 - protein, 275 aa, Bacillus sp. LG1
AQTVPWGIPHIKADKAHAAGVTGSGVKVAILDTGIDANHADLNVKGGASFVSGEPNALQDGNGHGTHVAGTVAALNNTTGVLGVAYNADLYAVKVLSASGSGTLSGIAQGIEWSISNGMNVINMSLGGSSGSTALQQACVNAYNRGIVVIAAAGNSGSSGNRNTMGYPARYSSVIAVGAVSSNNTRASFSSVGSELEVMAPGVNILSTTPGNNYASFNGTSMAAPHVAGAAALIKAKYPSMTNVQIRERLKNTATNLGDPFFYGKGVINVESALQ

SEQ ID NO: 68697 - protein, 275 aa, Bacillus sp. LG1
AQTVPWGIPHIKADKAHAAGVTGSGVKVAILDTGIDANHADLNVKGGASFVSGEPNALQDGNGHGTHVAGTVAALNNTTGVLGVAYNADLYAVKVLSNSGSGTLSGIAQGIEWSISNGMNVINMSLGGSSGSTALQQACNNAYNRGIVVIAAAGNSGSSGNRNTMGYPARYSSVIAVGAVSSNNTRASFSSVGSELEVMAPGVNILSTTPGNNYASFNGTSMAAPHVAGAAALIKAKYPSMTNVQIRERLKNTATNLGDPFFYGKGVINVESALQ

SEQ ID NO: 68698 - protein, 275 aa, Bacillus sp. LG1
AQTVPWGIPHIKADKAHAAGVTGSGVKVAILDTGIDANHADLNVKGGASFVSGEPNALQDGNGHGTHVAGTVAALNNTTGVLGVAYNADLYAVKVLSASGSGTLSGIAQGIEWSISNGMNVINMSLGGSSGSTALQQACNNAYNRGIVVIAAAGNSGSSGNRNTMGYPARYSSVIAVGAVSSNNTRASFSSVGSELEVMAPGVNILSTTPGNNYASFNGTSMAAPHVAGAAALIKAKYPSMTNVQMRERLKNTATNLGDPFFYGKGVINVESALQ

SEQ ID NO: 68699 - protein, 275 aa, Bacillus sp. LG1
AQTVPWGIPHIKADKAHAAGVTGSGVKVAILDTGIDANHADLNVKGGASFVSGEPNALQDGNGHGTHVAGTVAALNNTTGVLGVAYNADLYAVKVLSASGSGTLSGICQGIEWSISNGMNVINMSLGGSSGSTALQQACNNAYNRGIVVIAAAGNSGSSGNRNTMGYPARYSSVIAVGAVSSNNTRASFSSVGSELEVMAPGVNILSTTPGNNYASFNGTSMAAPHVAGAAALIKAKYPSMTNVQIRERLKNTATNLGDPFFYGKGVINVESALQ

SEQ ID NO: 68700 - protein, 275 aa, Bacillus sp. LG1
AQTVPWGIPHIKADKAHAAGVTGSGVKVAILDTGIDANHADLNVKGGASFVSGEPNALQDGNGHGTHVAGTVAALNNTTGVLGVAYNADLYAVKVLIASGSGTLSGIAQGIEWSISNGMNVINMSLGGSSGSTALQQACNNAYNRGIVVIAAAGNSGSSGNRNTMGYPARYSSVIAVGAVSSNNTRASFSSVGSELEVMAPGVNILSTTPGNNYASFNGTSMAAPHVAGAAALIKAKYPSMTNVQIRERLKNTATNLGDPFFYGKGVINVESALQ

SEQ ID NO: 68701 - protein, 275 aa, Bacillus sp. LG1
AQTVPWGIPHIKADKAHAAGVTGSGVKVAILDTGIDANHADLNVKGGASFVSGEPNALQDGNGHGTHVAGTVAALNNTTGVLGVAYNADLYAVKVLSASGSGTLSGIAQGIEWSISNGMNVINMSLGGSSGSTALQQACNNAYNRGIVVIAAAGNSGSSGNRNTMGYPARYSSVIAVGAVSSNNTRASFSSVGSELEVMAPGVNILSTTPGNNYASFNGTSMAAPHVAGAAALIKAKYPSMTNVQIRERLKRTATNLGDPFFYGKGVINVESALQ

SEQ ID NO: 68702 - protein, 275 aa, Bacillus sp. LG1
AQTVPWGIPHIKADKAHAAGVTGSGVKVAILDTGIDANHADLNVKGGASFVSGEPNALQDGNGHGTHVAGTVAALNNTTGVLGVAYNADLYAVKVLSASGSGTLSGIAQGIEWSISNGMNVINMSLGGSSGSTALQQACNNAYNRGIVVIAAAGNSGSSGNRNTMGYPARYSSVIAVGAVSSNNTRASFSSVGSELEVMAPGVNILSTTPGNNYASFNGTSMAPPHVAGAAALIKAKYPSMTNVQIRERLKNTATNLGDPFFYGKGVINVESALQ

SEQ ID NO: 68703 - protein, 275 aa, Bacillus sp. LG1
AQTVPWGIPHIKADKAHAAGVTGLGVKVAILDTGIDANHADLNVKGGASFVSGEPNALQDGNGHGTHVAGTVAALNNTTGVLGVAYNADLYAVKVLSASGSGTLSGIAQGIEWSISNGMNVINMSLGGSSGSTALQQACNNAYNRGIVVIAAAGNSGSSGNRNTMGYPARYSSVIAVGAVSSNNTRASFSSVGSELEVMAPGVNILSTTPGNNYASFNGTSMAAPHVAGAAALIKAKYPSMTNVQIRERLKNTATNLGDPFFYGKGVINVESALQ

SEQ ID NO: 68704 - protein, 275 aa, Bacillus sp. LG1
AQTVPWGIPHIKADKAHAAGVTGSGVKVAILDTGIDANHADLNVKGGASFVSGEPNALQDGNGHGTHVAGTVAALNNTTGVLGVAYNADLYAVKVLSASGSGTLSGIAQGIEWSISNGMNVINMSLGGSSGSTALQQACNNAYNRGIVVIAAAGNSGSSGNRNTMGYPARYSSVIAVGAVSSNNTRASFSSVGSELEVMAPGVNILSTTPGNNYASFNGTSMAAPHVAGAAALIKVKYPSMTNVQIRERLKNTATNLGDPFFYGKGVINVESALQ

SEQ ID NO: 68705 - protein, 275 aa, Bacillus sp. LG1
AQTVPWGIPHIKADKAHAAGVTGSGVKVAILDTGIDANHADLNVKGGASFVSGEPNALQDGNGHGTHVAGTVAALNNTTGVLGVAYNADLYAVKVLSASGSGTLSGIAQGIEWSISNGMNVINMSLGGSSGSTALQQACNNAYMRGIVVIAAAGNSGSSGNRNTMGYPARYSSVIAVGAVSSNNTRASFSSVGSELEVMAPGVNILSTTPGNNYASFNGTSMAAPHVAGAAALIKAKYPSMTNVQIRERLKNTATNLGDPFFYGKGVINVESALQ

SEQ ID NO: 68706 - protein, 275 aa, Bacillus sp. LG1
AQTVPWGIPHIKADKAHAAGVTGSGVKVAILDTGIDANHADLNVKGGASFVSGEPNALQDGNGHGTHVAGTVAALNNTTGVLGVAYNADLYAVKVLSASGSGTLSGIAQGIEWSISNGMNVINMSLGGSSGSTALLQACNNAYNRGIVVIAAAGNSGSSGNRNTMGYPARYSSVIAVGAVSSNNTRASFSSVGSELEVMAPGVNILSTTPGNNYASFNGTSMAAPHVAGAAALIKAKYPSMTNVQIRERLKNTATNLGDPFFYGKGVINVESALQ

SEQ ID NO: 68707 - protein, 275 aa, Bacillus subtilis
AQTTPWGITHINAHKAHSSSVTGSGVKVAVLDTGIDASHEDLNVKGGASFISGEPNALVDTNGHGTHVAGTVAALNNNIGVVGVAYNADLYAVKVLSASGSGTLSGIAQGVEWAIANNMDVINMSLGGSSGSTALKQAVDNAYASGIVVVAAAGNSGTRGRQNTMGYPARYSSVIAVGAVDSNNQRASFSSVGAELEVMAPGVSVLSTVPGGGYASYNGTSMASPHVAGAAALIKAKYPSLSASQIRDRLRNTATYLGDPFYYGNGVINVERALQ

SEQ ID NO: 68708 - protein, 275 aa, Bacillus sp. LG1
AQTVPWGIPHIKADKAHAAGVTGSGVKVAILDTGIDANHADLNVKGGASFVSGEPNALQDGNGHGTHVAGTVAALNNTTGVLGVAYNNDLYAVKVLSASGSGTLSGIAQGIEWSISNGMNVINMSLGGSSGSTALQQACNNAYNRGIVVIAAAGNSGSSGNRNTMGYPARYSSVIAVGAVSSNNTRASFSSVGSELEVMAPGVNILSTTPGNNYASFNGTSMAAPHVAGAAALIKAKYPSMTNVQIRERLKNTATNLGDPFFYGKGVINVESALQ

SEQ ID NO: 68709 - protein, 275 aa, Bacillus sp. LG1
AQTVPWGIPHIKADKAHAAGVTGSGVKVAILDTGIDANHADLNVKGGASFVSGEPNALQDGNGHGTHVAGTVAALNNTTGVLGVAYNADLYAVKVLSASGSGTLSGIAQGIEWSISNGMNVINMSLGGSSGSTALQQACNNAYNRGIVVMAAAGNSGSSGNRNTMGYPARYSSVIAVGAVSSNNTRASFSSVGSELEVMAPGVNILSTTPGNNYASFNGTSMAAPHVAGAAALIKAKYPSMTNVQIRERLKNTATNLGDPFFYGKGVINVESALQ

SEQ ID NO: 68710 - protein, 275 aa, Bacillus sp. LG1
AQTVPWGIPHIKADKAHAAGVTGSGVKVAILDTGIDANHADLNVKGGASFVSGEPNALQDGNGHGTHVAGTVAALNNTTGVLGVAYNADLYAVKVLSASGSGTLSGIAQGIEWSISNGMNVINMSLGGSSGSTALQQACNNAYNRGIVVIAAAGNSGSSGNRNTMGYPARYSSVIAVGAVSSNNTRASFSSVGSELEVMAPGVNILSTTPGNNYASFNGTSMAAPHVAGAAALIKAKYPSMQNVQIRERLKNTATNLGDPFFYGKGVINVESALQ

SEQ ID NO: 68711 - protein, 275 aa, Bacillus sp. LG1
AQTVPWGIPHIKADKAHAAGVTGSGVKVAILDTGIDANHADLNVKGGASFVSGEPNALQDGNGHGTHVAGTVAALNNTTGVLGVAYNADLYAVKVLSASGSGTLSGIAQGIEWSISNGMNVINMSLGGSSGSTALQQACNNAYNRGIVVIAAAGNSGSSGNRNTMGYPARYSSVIAVGAVSSNNTRASFSSVGSELEVMAPGVNILSTMPGNNYASFNGTSMAAPHVAGAAALIKAKYPSMTNVQIRERLKNTATNLGDPFFYGKGVINVESALQ

SEQ ID NO: 68712 - protein, 275 aa, Bacillus sp. LG1
AQTVPWGIPHIKADKAHAAGVTGSGVKVAILDTGIDANHADLNVKGGASFVSGEPNALQDGNGHGTHVAGTVAALNNTTGVLGVAYNADLYAVKVLSASGSGTLSGIAQGIEWSISNGMNVINMSLGGSSGSTALQQACNNAYNRGIVVIAAAGNSGSSGNRNTMGYPARYSSVIAVGAVSSNNTRASFSSVGSELEVMAPGVNILSTTPGNNYASFNGTSMAAPHVAGAAALIKAKYPVMTNVQIRERLKNTATNLGDPFFYGKGVINVESALQ

SEQ ID NO: 68713 - protein, 275 aa, Bacillus sp. LG1
AQTVPWGIPHIKADKAHAAGVTGSGVKVAILDTGIDANHADLNVKGGASFVSGEPNALQDGNGHGTHVAGTVAALSNTTGVLGVAYNADLYAVKVLSASGSGTLSGIAQGIEWSISNGMNVINMSLGGSSGSTALQQACNNAYNRGIVVIAAAGNSGSSGNRNTMGYPARYSSVIAVGAVSSNNTRASFSSVGSELEVMAPGVNILSTTPGNNYASFNGTSMAAPHVAGAAALIKAKYPSMTNVQIRERLKNTATNLGDPFFYGKGVINVESALQ

SEQ ID NO: 68714 - protein, 275 aa, Bacillus sp. LG1
AQTVPWGIPHIKADKAHAAGVTGSGVKVAILDTGIDANHADLNVKGGASFVSGEPNALQDGNGHGTHVAGTVAALNNTTGVLGVAYNADLYAVKVLSASGSGTLSGIAQGIEWSISNGMNVINMSLGGSSGSTALQQACNNAYNRGIVVIAAAGNSGSSGNRNTMGYPALYSSVIAVGAVSSNNTRASFSSVGSELEVMAPGVNILSTTPGNNYASFNGTSMAAPHVAGAAALIKAKYPSMTNVQIRERLKNTATNLGDPFFYGKGVINVESALQ

SEQ ID NO: 68715 - protein, 275 aa, Bacillus sp. LG1
AQTVPWGIPHIKADKAHAAGVTGSGVKVAILDTGIDANHADLNVKGGASFVSGEPNAHQDGNGHGTHVAGTVAALNNTTGVLGVAYNADLYAVKVLSASGSGTLSGIAQGIEWSISNGMNVINMSLGGSSGSTALQQACNNAYNRGIVVIAAAGNSGSSGNRNTMGYPARYSSVIAVGAVSSNNTRASFSSVGSELEVMAPGVNILSTTPGNNYASFNGTSMAAPHVAGAAALIKAKYPSMTNVQIRERLKNTATNLGDPFFYGKGVINVESALQ

SEQ ID NO: 68716 - protein, 275 aa, Bacillus sp. LG1
AQTVPWGIPHIKADKWHAAGVTGSGVKVAILDTGIDANHADLNVKGGASFVSGEPNALQDGNGHGTHVAGTVAALNNTTGVLGVAYNADLYAVKVLSASGSGTLSGIAQGIEWSISNGMNVINMSLGGSSGSTALQQACNNAYNRGIVVIAAAGNSGSSGNRNTMGYPARYSSVIAVGAVSSNNTRASFSSVGSELEVMAPGVNILSTTPGNNYASFNGTSMAAPHVAGAAALIKAKYPSMTNVQIRERLKNTATNLGDPFFYGKGVINVESALQ

SEQ ID NO: 68717 - protein, 275 aa, Bacillus sp. LG1
AQTVPWGIPHIKADKAHAAGVTGSGVKVAILDTGIDANHADLNVKGGASFVSGEPNALQDGNGHGTHVAGTVAALNNTTGVLGVAYNADLYAVKVLSASGSGTLSGIAQGIEWSISNGMNVINMSLGGSSGSTALQQACNNAYWRGIVVIAAAGNSGSSGNRNTMGYPARYSSVIAVGAVSSNNTRASFSSVGSELEVMAPGVNILSTTPGNNYASFNGTSMAAPHVAGAAALIKAKYPSMTNVQIRERLKNTATNLGDPFFYGKGVINVESALQ

SEQ ID NO: 68718 - protein, 275 aa, Bacillus sp. LG1
AQTVPWGIPHIKADKAHAAGVTGSGVKVAILDTGIDANHADLNVLGGASFVSGEPNALQDGNGHGTHVAGTVAALNNTTGVLGVAYNADLYAVKVLSASGSGTLSGIAQGIEWSISNGMNVINMSLGGSSGSTALQQACNNAYNRGIVVIAAAGNSGSSGNRNTMGYPARYSSVIAVGAVSSNNTRASFSSVGSELEVMAPGVNILSTTPGNNYASFNGTSMAAPHVAGAAALIKAKYPSMTNVQIRERLKNTATNLGDPFFYGKGVINVESALQ

SEQ ID NO: 68719 - protein, 275 aa, Bacillus sp. LG1
AQTVPWGIPHIKADKAHAAGVTGSGVKVAILDTGIDANHADLNVKGGASFVSGEPNALQDGNGHGTHVAGTVAALNNTTGVLGVAYNADLYAVKVLSASGSGTLSGIAQGIEWSISNGMNVINMSLGGSSGSTALQQACNNAYNRGIVVIAAAGNSGSSGNRNTMGYPARYSSVIAVGAVSSNNTRASFSSVGSELEVMAPGVNILSTTPGNNYASFNGTSMAAPHVAGAAALIKAKYPSQTNVQIRERLKNTATNLGDPFFYGKGVINVESALQ

SEQ ID NO: 68720 - protein, 275 aa, Bacillus sp. LG1
AQTVPWGIPHIKADKAHAAGVVGSGVKVAILDTGIDANHADLNVKGGASFVSGEPNALQDGNGHGTHVAGTVAALNNTTGVLGVAYNADLYAVKVLSASGSGTLSGIAQGIEWSISNGMNVINMSLGGSSGSTALQQACNNAYNRGIVVIAAAGNSGSSGNRNTMGYPARYSSVIAVGAVSSNNTRASFSSVGSELEVMAPGVNILSTTPGNNYASFNGTSMAAPHVAGAAALIKAKYPSMTNVQIRERLKNTATNLGDPFFYGKGVINVESALQ

SEQ ID NO: 68721 - protein, 275 aa, Bacillus sp. LG1
AQTVPWGIPHIKADKAHAAGVTGSGVKVAILDTGIDANHADLNVKGGASFVSGEPNALQDGNGHGTHVAGTVAALNNTTGVLGVAYNADLYAVKVLSASGSGTLSGIAQGIEWSISNGMNVINMSLGGSSGSTALQQACNNAYNRGIVVIAAAGNSGSSGNRNTMGYPARYSSVIAVGAVSSNNTRASFSSVGSELEVMAPGVNILSTTPGNNYASFNGTSMAAPHVAGAAALIKAKWPSMTNVQIRERLKNTATNLGDPFFYGKGVINVESALQ

SEQ ID NO: 68722 - protein, 275 aa, Bacillus sp. LG1
AQTVPWGIPHIKADKAHAAGVTGSGVKVAILDTGIDANHADLNVKGGASFVSGEPQALQDGNGHGTHVAGTVAALNNTTGVLGVAYNADLYAVKVLSASGSGTLSGIAQGIEWSISNGMNVINMSLGGSSGSTALQQACNNAYNRGIVVIAAAGNSGSSGNRNTMGYPARYSSVIAVGAVSSNNTRASFSSVGSELEVMAPGVNILSTTPGNNYASFNGTSMAAPHVAGAAALIKAKYPSMTNVQIRERLKNTATNLGDPFFYGKGVINVESALQ

SEQ ID NO: 68723 - protein, 275 aa, Bacillus sp. LG1
AQTVPWGIPHIKADKAHALGVTGSGVKVAILDTGIDANHADLNVKGGASFVSGEPNALQDGNGHGTHVAGTVAALNNTTGVLGVAYNADLYAVKVLSASGSGTLSGIAQGIEWSISNGMNVINMSLGGSSGSTALQQACNNAYNRGIVVIAAAGNSGSSGNRNTMGYPARYSSVIAVGAVSSNNTRASFSSVGSELEVMAPGVNILSTTPGNNYASFNGTSMAAPHVAGAAALIKAKYPSMTNVQIRERLKNTATNLGDPFFYGKGVINVESALQ

SEQ ID NO: 68724 - protein, 275 aa, Bacillus sp. LG1
AQTVPWGIPHIKADKAHAAGVTGSGVKVAILDTGIDANHADLNVKGGASFVSGEPNADQDGNGHGTHVAGTVAALNNTTGVLGVAYNADLYAVKVLSASGSGTLSGIAQGIEWSISNGMNVINMSLGGSSGSTALQQACNNAYNRGIVVIAAAGNSGSSGNRNTMGYPARYSSVIAVGAVSSNNTRASFSSVGSELEVMAPGVNILSTTPGNNYASFNGTSMAAPHVAGAAALIKAKYPSMTNVQIRERLKNTATNLGDPFFYGKGVINVESALQ

SEQ ID NO: 68725 - protein, 275 aa, Bacillus sp. LG1
AQTVPWGIPHIKADKAHAAGVTGSGVKVAILDTGIDANHADLNVKGGASFVSGEPNALQDGNGHGTHVAGTVAALNNTTGVLGVAYNADLYAVKVLSASGSGTLSGIAQGIEWSISNGMNVINMSLGGSSGSTALQQACNNAYNRGIVVIAAAGNSGSSGNRNTMGYPARYSSVIAVGAVSSNNTRASFSSVGSELEVMAPGVNILSTTPGNNYASFNGTSMAAPHVAGAAALIKAKYPSMTNVQIRERLKNTATNLGDPFFYGKGVINVESAYQ

SEQ ID NO: 68726 - protein, 275 aa, Bacillus sp. LG1
AQTVPWGIPHIKADKAHAAGVTGSGVKVAILDTGIDANHADLNVKGGASFVSGEPNALQDGNGHGTHVAGTVAALNNTTGVLGVAYNADLYAVKVLSASGSGTLSGIAQGIEWSISNGMNVINMSLGGSSGSTALQQACNNAYNRGIVVIAAAGNSGSSGNRNTMGYPARYSSVIAVGAVSSNNTRASFSSVGSELEVMAPGVNILSTTPGNNYASFNGTSMAAPHVAGAAALIKLKYPSMTNVQIRERLKNTATNLGDPFFYGKGVINVESALQ

SEQ ID NO: 68727 - protein, 275 aa, Bacillus sp. LG1
AQTVPWGIPHIKADKAHAAGVTGSGVKVAILDTGIDANHADLNVKGGASFVSGEPNALQDGNGHGTHVAGTVAALNNTTGVLGVAYNADLYAVKVLSASGSGTLSGIAQGIEWSISNGMNVINMSLGGSSGSTALQQACNNAYNRGIVVIAAAGNSGSSGNRNTMGYPARYSSVIAVGAVSSNNMRASFSSVGSELEVMAPGVNILSTTPGNNYASFNGTSMAAPHVAGAAALIKAKYPSMTNVQIRERLKNTATNLGDPFFYGKGVINVESALQ

SEQ ID NO: 68728 - protein, 275 aa, Bacillus sp. LG1
AQTVPWGIPHIKADKAHAAGVTGSGVKVAILDTGIDANHADLNVKGGASFVSGEPNALQDGNGHGTHVAGTVAALNNTTGVLGVAYNADLYAVKVLSASGSGLLSGIAQGIEWSISNGMNVINMSLGGSSGSTALQQACNNAYNRGIVVIAAAGNSGSSGNRNTMGYPARYSSVIAVGAVSSNNTRASFSSVGSELEVMAPGVNILSTTPGNNYASFNGTSMAAPHVAGAAALIKAKYPSMTNVQIRERLKNTATNLGDPFFYGKGVINVESALQ

SEQ ID NO: 68729 - protein, 275 aa, Bacillus sp. LG1
AQTVPWGIPHIKADKAHAAGVTGSGVKVAILDTGIDANHADLNVKGGASFVSGEPNALQDGNGHGTHVAGTVAALNNTTGVLGVAYNDDLYAVKVLSASGSGTLSGIAQGIEWSISNGMNVINMSLGGSSGSTALQQACNNAYNRGIVVIAAAGNSGSSGNRNTMGYPARYSSVIAVGAVSSNNTRASFSSVGSELEVMAPGVNILSTTPGNNYASFNGTSMAAPHVAGAAALIKAKYPSMTNVQIRERLKNTATNLGDPFFYGKGVINVESALQ

SEQ ID NO: 68730 - protein, 275 aa, Bacillus sp. LG1
AQTVPWGIPHIKADKAHAAGVTGSGVKVAILDTGIDANHADLNVKGGASFVSGEPNALQDGNGHGTHVAGTVAALNNTTGVLGVAYNADLYAVKVLSASGSGTLSGIAQGIEWSISNGMNVINMSLGGSSGSTALQQACNNAYNRGIVVIAAAGNSGSSGNRNTMGYPARYSSVIAVGAVSSNNTRASFSSVGSELEVMAPGVNILSTTPGNNYASFNGTSMAAPHVAGAAALIKAKYPSMTNVQARERLKNTATNLGDPFFYGKGVINVESALQ

SEQ ID NO: 68731 - protein, 275 aa, Bacillus sp. LG1
AQTVPWGIPHIKADKAHAAGVTGSGVKVAILDTGIDANHADLNVKGGASFVSGEPNALQDGNGHGTHVAGTVAALNNTTGVLGVAYNADLYAVKVLSASGSGTLSGIAQGIEWSISNGMPVINMSLGGSSGSTALQQACNNAYNRGIVVIAAAGNSGSSGNRNTMGYPARYSSVIAVGAVSSNNTRASFSSVGSELEVMAPGVNILSTTPGNNYASFNGTSMAAPHVAGAAALIKAKYPSMTNVQIRERLKNTATNLGDPFFYGKGVINVESALQ

SEQ ID NO: 68732 - protein, 275 aa, Bacillus sp. LG1
AQTVPWGIPHIKADKAHAAGVTGSGVKVAILDTGIDANHADLNVKGGASFVSGEPNKLQDGNGHGTHVAGTVAALNNTTGVLGVAYNADLYAVKVLSASGSGTLSGIAQGIEWSISNGMNVINMSLGGSSGSTALQQACNNAYNRGIVVIAAAGNSGSSGNRNTMGYPARYSSVIAVGAVSSNNTRASFSSVGSELEVMAPGVNILSTTPGNNYASFNGTSMAAPHVAGAAALIKAKYPSMTNVQIRERLKNTATNLGDPFFYGKGVINVESALQ

SEQ ID NO: 68733 - protein, 275 aa, Bacillus sp. LG1
AQTVPWGIPHIKADKAHAAGVTGSGVKVAILDTGIDANHADLNVKGGASFVSGEPNALQDGNGHGTHVAGTVAALNNTTGVLGVAYNADLYAVKVLSASGSGTLSGIAQGIEWSISNGMNVINMSLGGSSGSTALQQACNNAYYRGIVVIAAAGNSGSSGNRNTMGYPARYSSVIAVGAVSSNNTRASFSSVGSELEVMAPGVNILSTTPGNNYASFNGTSMAAPHVAGAAALIKAKYPSMTNVQIRERLKNTATNLGDPFFYGKGVINVESALQ

SEQ ID NO: 68734 - protein, 275 aa, Bacillus sp. LG1
AQTVPWGIPHIKADKAHAAGVTGPGVKVAILDTGIDANHADLNVKGGASFVSGEPNALQDGNGHGTHVAGTVAALNNTTGVLGVAYNADLYAVKVLSASGSGTLSGIAQGIEWSISNGMNVINMSLGGSSGSTALQQACNNAYNRGIVVIAAAGNSGSSGNRNTMGYPARYSSVIAVGAVSSNNTRASFSSVGSELEVMAPGVNILSTTPGNNYASFNGTSMAAPHVAGAAALIKAKYPSMTNVQIRERLKNTATNLGDPFFYGKGVINVESALQ

SEQ ID NO: 68735 - protein, 275 aa, Bacillus sp. LG1
AQTVPWGIPHIKADKAHAAGVTGSGVKVAILDTGIDANHADLNVKGGASFVSGEPNALQDGNGHGTHVAGTVAALNNTTGVLGVAYNADLYAVKVLSASGSGTLSGIAQGIEWSISNGMNVINMSLGGHSGSTALQQACNNAYNRGIVVIAAAGNSGSSGNRNTMGYPARYSSVIAVGAVSSNNTRASFSSVGSELEVMAPGVNILSTTPGNNYASFNGTSMAAPHVAGAAALIKAKYPSMTNVQIRERLKNTATNLGDPFFYGKGVINVESALQ

SEQ ID NO: 68736 - protein, 275 aa, Bacillus sp. LG1
AQTVPWGIPHIKADKAHAAGVTGSGVKVAILDTGIDANHADLNVKGGASFVSGEPNALQDGNGHGTHVAGTVAALNNTTGVLGVAYNADLYAVKVLSASGSGTLSGIAQGIEWSISNGMNVINMSLGGSSGSTALQQACNNAYNRGIVVIAAAGNSGSSGNRNTMGYPARYSSVIAVGAVSSNNTRASFSSVGSELEVMAPGVNILSTQPGNNYASFNGTSMAAPHVAGAAALIKAKYPSMTNVQIRERLKNTATNLGDPFFYGKGVINVESALQ

SEQ ID NO: 68737 - protein, 275 aa, Bacillus sp. LG1
AQTVPWGIPHIKADKAHAAGVTGSGVKVAILDTGIDANHADLNVKGGASFVSGEPNALQDGNGHGTHVAGTVAALNNTTGVLGVAYNADLYAVKVLSASGSGRLSGIAQGIEWSISNGMNVINMSLGGSSGSTALQQACNNAYNRGIVVIAAAGNSGSSGNRNTMGYPARYSSVIAVGAVSSNNTRASFSSVGSELEVMAPGVNILSTTPGNNYASFNGTSMAAPHVAGAAALIKAKYPSMTNVQIRERLKNTATNLGDPFFYGKGVINVESALQ

SEQ ID NO: 68738 - protein, 275 aa, Bacillus sp. LG1
AQTVPWGIPHIKADKAHAAGVTGSGVKVAILDTGIDANHADLNVKGGASFVSGEPNALQDGNGHGTHVAGTVAALNNTTGVLGVAYNADLYAVKVLSASGSGTLSGIAQGIEWSIFNGMNVINMSLGGSSGSTALQQACNNAYNRGIVVIAAAGNSGSSGNRNTMGYPARYSSVIAVGAVSSNNTRASFSSVGSELEVMAPGVNILSTTPGNNYASFNGTSMAAPHVAGAAALIKAKYPSMTNVQIRERLKNTATNLGDPFFYGKGVINVESALQ

SEQ ID NO: 68739 - protein, 275 aa, Bacillus sp. LG1
AQTVPWGIPHIKADKAHAAGVTGSFVKVAILDTGIDANHADLNVKGGASFVSGEPNALQDGNGHGTHVAGTVAALNNTTGVLGVAYNADLYAVKVLSASGSGTLSGIAQGIEWSISNGMNVINMSLGGSSGSTALQQACNNAYNRGIVVIAAAGNSGSSGNRNTMGYPARYSSVIAVGAVSSNNTRASFSSVGSELEVMAPGVNILSTTPGNNYASFNGTSMAAPHVAGAAALIKAKYPSMTNVQIRERLKNTATNLGDPFFYGKGVINVESALQ

SEQ ID NO: 68740 - protein, 275 aa, Bacillus sp. LG1
AQTVPWGIPHIKADKAHAAGVTGSGVKVAILDTGIDANHADLNVKGGASFVSGEPNALQDGNGHGTHVAGTVAALNNTTGVLGVAYNAFLYAVKVLSASGSGTLSGIAQGIEWSISNGMNVINMSLGGSSGSTALQQACNNAYNRGIVVIAAAGNSGSSGNRNTMGYPARYSSVIAVGAVSSNNTRASFSSVGSELEVMAPGVNILSTTPGNNYASFNGTSMAAPHVAGAAALIKAKYPSMTNVQIRERLKNTATNLGDPFFYGKGVINVESALQ

SEQ ID NO: 68741 - protein, 275 aa, Bacillus sp. LG1
AQTVPWGIPHIKADKAHAAGVTGSGVKVAILDTGIDANHADLNVKGGASFVSGEPNALQDGNGHGTHVAGTVAALNNTTGVLGVAYNADLYAVKVLSASGSGTLSGIAQGIEWSISNGMNVINMSLGGSSGSTALQQACNNAYNRGIVVIAAAGNSGSSGNRNTMGYPARYSSVIAVGAVSSNNTRASFSSVGSELEVMAPGLNILSTTPGNNYASFNGTSMAAPHVAGAAALIKAKYPSMTNVQIRERLKNTATNLGDPFFYGKGVINVESALQ

SEQ ID NO: 68742 - protein, 275 aa, Bacillus sp.
AQTVPWGIPHIKADKAHGTGVTGSGVKVAILDTGIDANHADLNVKGGASFVSGEPNALQDGNGHGTHVAGTVAALNNTTGVLGVAYNADLYAVKVLSASGSGTLSGIAQGIEWSIANDMDVINMSLGGSSGSTTLQQACDNAYASGIVVIAAAGNSGSKGKRNTIGYPAKYNSVIAVGAVDSSNNRASFSSVGSELEVMAPGVNILSTTPGNKYSSFNGTSMASPHVAGAAALIIAKYPNMTNVQIRERLKNTATNLGDPFFFGKGVINVESALQ

SEQ ID NO: 68743 - protein, 275 aa, Bacillus sp. LG1
AQTVPWGIPHIKADKAHAAGVTGSGVKVAILDTGIDANHADLNVKGGASFVSGEPNALQDGNGHGTHVAGTVAALNNTTGVLGVAYNADLYAVKVLSASGSGTLSGIAQGIEWSISNGMNVINMSLGGSSGSTALQQACNNAYNRGIVVIAAAGNSGSSGNRNTMGYPARYSSVIAVGAVSSNNTRASFSSVGFELEVMAPGVNILSTTPGNNYASFNGTSMAAPHVAGAAALIKAKYPSMTNVQIRERLKNTATNLGDPFFYGKGVINVESALQ

SEQ ID NO: 68744 - protein, 275 aa, Bacillus sp. LG1
AQTVPWGIPHIKADKAHAAGVTGSGVKVAILDTGIDANHADLNVKGGASFVSGEPNALQDGNGHGTHVAGTVAALNNTTGVLGVAYNADLYAVKVLLASGSGTLSGIAQGIEWSISNGMNVINMSLGGSSGSTALQQACNNAYNRGIVVIAAAGNSGSSGNRNTMGYPARYSSVIAVGAVSSNNTRASFSSVGSELEVMAPGVNILSTTPGNNYASFNGTSMAAPHVAGAAALIKAKYPSMTNVQIRERLKNTATNLGDPFFYGKGVINVESALQ

SEQ ID NO: 68745 - protein, 275 aa, Bacillus sp. LG1
AQTVPWGIPHIKADKAHAAGVTGSGVKVAILDTGIDANHADLNVKGGASFVSGEPNALQDGNGHGTHVAGTVAALNNTTGVLGVAYNADLYAVKVLSASGSGTLSGIAQGIEWSISNGMNVINMSLGGSSGSTALQQACNNAYNRGIVVIAAAGNSGSSGNRNTMGYPARYSSVIAVGAVSSNNTRASFSSVGSELEVMAPGVNILSTTPGNNYASFNGTSMAAPHVAGAAALIKAKYPSMTNVQIRERLKLTATNLGDPFFYGKGVINVESALQ

SEQ ID NO: 68746 - protein, 275 aa, Bacillus sp. LG1
AQTVPWGIPHIKADKAHAAGVTGSGVKVAILDTGIDANHADLNVKGGASFVSGEPNALQDGNGHGTHVAGTVAALNNTTGVLGVAYNADLYAVKVLSASGSGTLSGIAQGIEWSISNGMNVINMSLGGSSGSTALQQACNNAYNRGIVVIAAAGNSGSSGNRNTMGYPARYSSVIAVGAVSSNNTRASFSSVGSELEVMAPGVNIRSTTPGNNYASFNGTSMAAPHVAGAAALIKAKYPSMTNVQIRERLKNTATNLGDPFFYGKGVINVESALQ

SEQ ID NO: 68747 - protein, 275 aa, Bacillus sp. LG1
AQTVPPGIPHIKADKAHAAGVTGSGVKVAILDTGIDANHADLNVKGGASFVSGEPNALQDGNGHGTHVAGTVAALNNTTGVLGVAYNADLYAVKVLSASGSGTLSGIAQGIEWSISNGMNVINMSLGGSSGSTALQQACNNAYNRGIVVIAAAGNSGSSGNRNTMGYPARYSSVIAVGAVSSNNTRASFSSVGSELEVMAPGVNILSTTPGNNYASFNGTSMAAPHVAGAAALIKAKYPSMTNVQIRERLKNTATNLGDPFFYGKGVINVESALQ

SEQ ID NO: 68748 - protein, 275 aa, Bacillus sp. LG1
AQTVPWGIPHIKADKAHAAGVTGSGVKVAILDTGIDANHADLNVKGGASFVFGEPNALQDGNGHGTHVAGTVAALNNTTGVLGVAYNADLYAVKVLSASGSGTLSGIAQGIEWSISNGMNVINMSLGGSSGSTALQQACNNAYNRGIVVIAAAGNSGSSGNRNTMGYPARYSSVIAVGAVSSNNTRASFSSVGSELEVMAPGVNILSTTPGNNYASFNGTSMAAPHVAGAAALIKAKYPSMTNVQIRERLKNTATNLGDPFFYGKGVINVESALQ

SEQ ID NO: 68749 - protein, 275 aa, Bacillus sp. LG1
AQTVPWGIPHIKADKAHAAGVTGSGVKVAILDTGIDANHADLNVKGGASFVSGEPNALQDGNGHGTHVAGTVAALNNTTGVLGVAYNADLYAVKVLSASGSGTLSGIAQGIEWSISNGMNVINMSLGGSSGSTALQQACFNAYNRGIVVIAAAGNSGSSGNRNTMGYPARYSSVIAVGAVSSNNTRASFSSVGSELEVMAPGVNILSTTPGNNYASFNGTSMAAPHVAGAAALIKAKYPSMTNVQIRERLKNTATNLGDPFFYGKGVINVESALQ

SEQ ID NO: 68750 - protein, 275 aa, Bacillus sp. LG1
AQTVPWGIPHIKADKAHAAGVTGSGVKVAILDTGIDANHADLNVKGGASFVSGEPNALQDGNGHGTHVAGTVAALNNTTGVLGVAYNADLYAVKVLSASGSGTLSGIAQGIEWSISNGMNVINMSLGGGSGSTALQQACNNAYNRGIVVIAAAGNSGSSGNRNTMGYPARYSSVIAVGAVSSNNTRASFSSVGSELEVMAPGVNILSTTPGNNYASFNGTSMAAPHVAGAAALIKAKYPSMTNVQIRERLKNTATNLGDPFFYGKGVINVESALQ

SEQ ID NO: 68751 - protein, 275 aa, Bacillus sp. LG1
AQTVPWGIPHIKADKAHAAGVTGSGVKVAILDTGIDANHADLNVKGGASFVSGEPNALQDGNGHGTHVAGTVAALNNTTGVLGVAYNADLYAVKVLSASGSGTLSGIAQGIEWSISNGMNVINMSLGGSSGSTALQQACNNAYNRGIVVIAAAGNSGSSGNRNTMGYPARYYSVIAVGAVSSNNTRASFSSVGSELEVMAPGVNILSTTPGNNYASFNGTSMAAPHVAGAAALIKAKYPSMTNVQIRERLKNTATNLGDPFFYGKGVINVESALQ

SEQ ID NO: 68752 - protein, 275 aa, Bacillus sp. LG1
AQTVPWGIPHIKADKAHAAGVTGSGVKVAILDTGIDANHADLNVKGGASFVSGEPNALQDGNGHGTHVAGTVAALNNTTGVLGVAYNADLYAVKVLSASGSGTLSGIAKGIEWSISNGMNVINMSLGGSSGSTALQQACNNAYNRGIVVIAAAGNSGSSGNRNTMGYPARYSSVIAVGAVSSNNTRASFSSVGSELEVMAPGVNILSTTPGNNYASFNGTSMAAPHVAGAAALIKAKYPSMTNVQIRERLKNTATNLGDPFFYGKGVINVESALQ

SEQ ID NO: 68753 - protein, 275 aa, Bacillus sp. LG1
AQTVPWGIPHIKADKAHAAGVTGSGVKVAILDTGIDANHADLNVKGGASFVSGEPNALQDGNGHGTHVAGTVAALNNTTGVLGVAYNADLYAVKVLSASGSGTLSGIAQGIEWGISNGMNVINMSLGGSSGSTALQQACNNAYNRGIVVIAAAGNSGSSGNRNTMGYPARYSSVIAVGAVSSNNTRASFSSVGSELEVMAPGVNILSTTPGNNYASFNGTSMAAPHVAGAAALIKAKYPSMTNVQIRERLKNTATNLGDPFFYGKGVINVESALQ

SEQ ID NO: 68754 - protein, 275 aa, Bacillus sp. LG1
AQTVPWGIPHIKADKAHAAGVTGSGVKVAILDTGIDANHADLNVKGGASFVSGEPNALQDGNGHGTHVAGTVAALNNTTGVLGVAYNADLYAVKVLSASGSGTLSGIAQGIEWSISNGMNVINMSLGGSSGSTALQQACNNAYNRGIVVIAAAGNSGSSGNRNTMGYPARYSSVIAVGAVSSNNTRASFSSVGSELEVMAPGVNILSTTPGNNYASFNGTSMAAPHVAGAAALIKAKYPSMTNVQIRERLKNTATNLGDPFEYGKGVINVESALQ

SEQ ID NO: 68755 - protein, 275 aa, Bacillus sp. LG1
AQTVPWGIPHIKADKAHAAGVTGSGVKVAILDTGIDANHADLNVKGGASFVSGEPNALQDGNGHGTHVAGTVAALNNTTGVLGVAYNADLYAVKVLSASGSGTLSGIAQGIEWSISNGMNVINMSLGGSSGSTALQQACNNAYNRGIVVIAAAGNSGSSGNRNTMGYPARYSSVIAVGAVSSNNTRASFSSVGSELEVMAPGVNILSTTPGNNYASFNGTSMAAPHVAGAAALIKAKDPSMTNVQIRERLKNTATNLGDPFFYGKGVINVESALQ

SEQ ID NO: 68756 - protein, 275 aa, Bacillus sp. LG1
AQTVPWGIPHIKADKAHAAGVTGSGVKVAILDTGIDANHADLNVKGGASFVSGEPNALQDGNGHGTHVAGTVAALNNTTGVLGVAYNADLYAVKVLSASGSGTLSGIAQGIEWSISNGMNVINMSLGGSSGSTALQQACNNAYNRGIVVIAAAGNSGSSGNRNTMGYPARYSSVIAVGAVSSNNTRASFSSVGSELEVMAPGVNILSTTPGNNYASFNGTSMAAPHVAGAAALIKAKYPSMTNVQIRERLMNTATNLGDPFFYGKGVINVESALQ

SEQ ID NO: 68757 - protein, 275 aa, Bacillus sp. LG1
AQTVPWGIPHIKADKAHAAGVTGSGVKVAILDTGIDANHADLNVKGGASFVSGEPNALQDGNGHGTHVAGTVAALNNTTGVLGVAYNADLYAVKVLSASGSGTLSGIAQGIEWSISNGMNVINMSLGGSSGSTALQQACNNAYNRGIVVIAAAGNSGSSGNRNTMGYPARYSSVIAVGAVSSNNTRASFSSVGSELEVMAPGVNILSTTPGNNYASFNGTSMAAPHVAGAAALIKAKYPSMTNVQIRYRLKNTATNLGDPFFYGKGVINVESALQ

SEQ ID NO: 68758 - protein, 275 aa, Bacillus sp. LG1
AQTVPWGIPHIKADKQHAAGVTGSGVKVAILDTGIDANHADLNVKGGASFVSGEPNALQDGNGHGTHVAGTVAALNNTTGVLGVAYNADLYAVKVLSASGSGTLSGIAQGIEWSISNGMNVINMSLGGSSGSTALQQACNNAYNRGIVVIAAAGNSGSSGNRNTMGYPARYSSVIAVGAVSSNNTRASFSSVGSELEVMAPGVNILSTTPGNNYASFNGTSMAAPHVAGAAALIKAKYPSMTNVQIRERLKNTATNLGDPFFYGKGVINVESALQ

SEQ ID NO: 68759 - protein, 275 aa, Bacillus sp. LG1
AQTVPWGIPHIKADKAHAAGVTGSGVKVAILDTGIDANHADLNVKGGASFVSGEPNALQDGNGHGTHVAGTVAALNNTTGVLGVAYNADLYAVKVLSASGSGDLSGIAQGIEWSISNGMNVINMSLGGSSGSTALQQACNNAYNRGIVVIAAAGNSGSSGNRNTMGYPARYSSVIAVGAVSSNNTRASFSSVGSELEVMAPGVNILSTTPGNNYASFNGTSMAAPHVAGAAALIKAKYPSMTNVQIRERLKNTATNLGDPFFYGKGVINVESALQ

SEQ ID NO: 68760 - protein, 275 aa, Bacillus sp. LG1
AQTVPWGIPHIKADKAHAAGVTGRGVKVAILDTGIDANHADLNVKGGASFVSGEPNALQDGNGHGTHVAGTVAALNNTTGVLGVAYNADLYAVKVLSASGSGTLSGIAQGIEWSISNGMNVINMSLGGSSGSTALQQACNNAYNRGIVVIAAAGNSGSSGNRNTMGYPARYSSVIAVGAVSSNNTRASFSSVGSELEVMAPGVNILSTTPGNNYASFNGTSMAAPHVAGAAALIKAKYPSMTNVQIRERLKNTATNLGDPFFYGKGVINVESALQ

SEQ ID NO: 68761 - protein, 275 aa, Bacillus sp. LG1
AQTVPWGIPHIKADKAHAAGVTGSGVKVAILDTGIDANHADLNVKGGASFVSGEPNALQDGNGHGTHVAGTVAALNNTTGVLGVAYNAKLYAVKVLSASGSGTLSGIAQGIEWSISNGMNVINMSLGGSSGSTALQQACNNAYNRGIVVIAAAGNSGSSGNRNTMGYPARYSSVIAVGAVSSNNTRASFSSVGSELEVMAPGVNILSTTPGNNYASFNGTSMAAPHVAGAAALIKAKYPSMTNVQIRERLKNTATNLGDPFFYGKGVINVESALQ

SEQ ID NO: 68762 - protein, 275 aa, Bacillus sp. LG1
AQTVPWGIPHIKADKAHAAGVTGSGVKVAILDTGIDANHADLNVKGGASFVSGEPNALQDGNGHGTHVAGTVAALNNTTGVLGVATNADLYAVKVLSASGSGTLSGIAQGIEWSISNGMNVINMSLGGSSGSTALQQACNNAYNRGIVVIAAAGNSGSSGNRNTMGYPARYSSVIAVGAVSSNNTRASFSSVGSELEVMAPGVNILSTTPGNNYASFNGTSMAAPHVAGAAALIKAKYPSMTNVQIRERLKNTATNLGDPFFYGKGVINVESALQ

SEQ ID NO: 68763 - protein, 275 aa, Bacillus sp. LG1
AQTVPWGIPHIKADKAHAAGVTGSGVKVAILDTGIDANHADLNVKGGASFVSGEPNALQDGNGHGTHVAGTVAALNNTTGVLGVAYNADLYAVKVLSASGSGTLSGIAQGIEWSISNGMNVINMSLGGSSGSTALQQACNNAYNRGIVVIAAAGNSGSSGNRNTMGYPARYSSVIAVGAVSSNNTRASFSSVGSELEVMAPGVNILSTTPGNNYASFNGTSMAAPHVAGAAALIAAKYPSMTNVQIRERLKNTATNLGDPFFYGKGVINVESALQ

SEQ ID NO: 68764 - protein, 275 aa, Bacillus sp. LG1
AQTVPWGIPHIKADKAHAAGVTGSGVKVAILDTGIDANHADLNVKGGASFVSGEPNALQDGNGHGTHVAGTVAALNNTTGVLGVAYNADLYAVKVLSASGSGTLSGIAQGIEWSISNGMNVINMSLGGSSGSTALQQACNNAYNRGIVVIAAAGNSGSSGNRNTMGYPARYSSVIAVGAVSSNNTRASFSSVGSELEVMAPGVNILSTTPGNNYASFNGTSMAAPHVAGAAALIKAKYPSHTNVQIRERLKNTATNLGDPFFYGKGVINVESALQ

SEQ ID NO: 68765 - protein, 275 aa, Bacillus subtilis
AQTTPWGITHINAHKAHSSSVTGSGVKVAVLDTGIDASHPDLNVKGGASFISGEPNALVDTNGHGTHVAGTVAALNNTIGVVGVAYNADLYAVKVLSASGSGTLSGIAQGVEWAIANNMDVINMSLGGSSGSTALKQAVDNAYASGIVVVAAAGNSGTRGRQNTMQYPARYSSVIAVGAVDSNNQRASFSSVGAELEVMAPGVSVLSTVPGGGYASYSGTSMASPHVAGAAALIKAKYPSLSASQIRDRLRNTATYLGDPFYYGNGVINVERALQ

SEQ ID NO: 68766 - protein, 275 aa, Bacillus subtilis
AQTTPWGITHINAHKAHSSSVTGSGVKVAVLDTGIDASHPDLNVKGGASFISGEPNALVDTNGHGTHVSGTVAALNNNIGVVGVAYNADLYAVKVLSASGSGTLSGIAQGVEWAIANNMDVINMSLGGSSGSTALKQAVDNAYASGIVVVAAAGNSGTRGRQNTMGYPARYSSVIAVGAVDSNNQRASFSSVGAELEVMAPGVSVLSTVPGGGYASYNGTSMASPHVAGAAALIKAKYPSLSASQIRDRLRNTATYLGPPFYYGNGVINVERALQ

SEQ ID NO: 68767 - protein, 275 aa, Unidentified
AQTVPWGIPHIKADKAHASGVTGSGVKVAILDTGIDANHTDLNVKGGASFVSGEPNALQDGNGHGTHVAGTVAALNNSTGVLGVAYNADLYAVKVLSASGSGTLSGIAQGIEWSIANGMNVINMSLGGSTGSTALQQACDNAYARGIVVIAAAGNSGSRGKQNTMGYPARYSSVIAVGAVDSSNNRASFSSVGNELEVMAPGVNILSTTPGNNYASFNGTSMASPHVAGAAALIKAKYPSMTNVQIRDRLKNTATNLGDPFFYGKGVINVESALQ

SEQ ID NO: 68768 - protein, 275 aa, Bacillus sp. LG1
AQTVPWGIPHIKADKAHAAGVTGSGVKVAILDTGIDANHADLNVKGGASFVSGEPNALQDGNGHGTHVAGTVAALNNTTGVLGVAYNADLYAVKVLSASGSGTLSGIAQGIEWSISNGMNVINMSLGGSSGSTALQQACNNAYNRGIVVIAAAGNSGSSGNRNTMGYPARYSSVIAVGAVSSNNTRASFSSVGSELEVMAPGVNILSTTPGNNYASFNGTSMAAPHVAGAAALIKEKYPSMTNVQIRERLKNTATNLGDPFFYGKGVINVESALQ

SEQ ID NO: 68769 - protein, 274 aa, Bacillus sp.
AQTVPWGIPHIKADKAHAAGVTGSGVKVAILDTGIDANHADLNVKGGASFVSGEPNLQDGNGHGTHVAGTVAALNNTTGVLGVAYNADLYAVKVLSASGSGTLSGIAQGIEWSISNGMNVINMSLGGSSGSTALQQACNNAYNRGIVVIAAAGNSGSSGNRNTMGYPARYSSVIAVGAVSSNNTRASFSSVGSELEVMAPGVNILSTTPGNNYASFNGTSMAAPHVAGAAALIKAKYPSMTNVQIRERLKNTATNLGDPFFYGKGVINVESALQ

SEQ ID NO: 68770 - protein, 275 aa, Bacillus sp. LG1
AQTVPWGIPHIKADKAHAAGVTGSGVKVAILDTGIDANHADLNVKGGASFVSGEPNALQDGNGHGTHVAGTVAALNNTTGVLGVAYNADLYAVKVLSASGSGTLSGIAQGIEWSISNGMNVINMSLGGSSGSTALQQACNNAYNRGIVVIAAAGNSGSSGNRNTMGYPARYSSVIAVGAVSSNNTRASFSSVGSELEVMAPGVNILSTTPGNNYASFNGTSMAAPHVAGAAALIKAKYPSMTNVQIRERLKNTATNLGDPFFYGKGGINVESALQ

SEQ ID NO: 68771 - protein, 275 aa, Bacillus sp. LG1
AQTVPWGIPHIKADKAHAAGVTGSGVKVAILDTGIDANHADLNVKGGASFVSGEPNALQDGNGHGTHVAGTVAALNNTTGVLGVAYNADLYAVKVLSASGSGTLSGIAQGIEWSISNGMNVINMSLGGSSGSTALQQACNNAYNRGIVVIAAAGNSGSSGNRNTMGYPARYSSVIAVGAVSSNNTRASFSSVGSELEVMAPGVNILSTTPGNNYASFNGTSMAAPHVAGAAALIKAKYPFMTNVQIRERLKNTATNLGDPFFYGKGVINVESALQ

SEQ ID NO: 68772 - protein, 275 aa, Bacillus sp. LG1
AQTVPWGIPHIKADKAHAAGVTGSGVKVAILDTGIDANHADLNVKGGASFVSGEPNALQDGNGHGTHVAGTVAALRNTTGVLGVAYNADLYAVKVLSASGSGTLSGIAQGIEWSISNGMNVINMSLGGSSGSTALQQACNNAYNRGIVVIAAAGNSGSSGNRNTMGYPARYSSVIAVGAVSSNNTRASFSSVGSELEVMAPGVNILSTTPGNNYASFNGTSMAAPHVAGAAALIKAKYPSMTNVQIRERLKNTATNLGDPFFYGKGVINVESALQ

SEQ ID NO: 68773 - protein, 275 aa, Bacillus sp. LG1
AQTVPWGIPHIKADKAHAAGVTGSGVKVAILDTGIDANHADLNVKGGASFVSGEPNALQDGNGHGTHVAGTVAALENTTGVLGVAYNADLYAVKVLSASGSGTLSGIAQGIEWSISNGMNVINMSLGGSSGSTALQQACNNAYNRGIVVIAAAGNSGSSGNRNTMGYPARYSSVIAVGAVSSNNTRASFSSVGSELEVMAPGVNILSTTPGNNYASFNGTSMAAPHVAGAAALIKAKYPSMTNVQIRERLKNTATNLGDPFFYGKGVINVESALQ

SEQ ID NO: 68774 - protein, 275 aa, Bacillus sp. LG1
AQTVPWGIPHIKADKAHAAGVLGSGVKVAILDTGIDANHADLNVKGGASFVSGEPNALQDGNGHGTHVAGTVAALNNTTGVLGVAYNADLYAVKVLSASGSGTLSGIAQGIEWSISNGMNVINMSLGGSSGSTALQQACNNAYNRGIVVIAAAGNSGSSGNRNTMGYPARYSSVIAVGAVSSNNTRASFSSVGSELEVMAPGVNILSTTPGNNYASFNGTSMAAPHVAGAAALIKAKYPSMTNVQIRERLKNTATNLGDPFFYGKGVINVESALQ

SEQ ID NO: 68775 - protein, 275 aa, Bacillus sp. LG1
AQTVPWGIPHIKADKAHAAGVTGSGVKVAILDTGIDANHEDLNVKGGASFVSGEPNALQDGNGHGTHVAGTVAALNNTTGVLGVAYNADLYAVKVLSASGSGTLSGIAQGIEWSISNGMNVINMSLGGSSGSTALQQACNNAYNRGIVVIAAAGNSGSSGNRNTMGYPARYSSVIAVGAVSSNNTRASFSSVGSELEVMAPGVNILSTTPGNNYASFNGTSMAAPHVAGAAALIKAKYPSMTNVQIRERLKNTATNLGDPFFYGKGVINVESALQ

SEQ ID NO: 68776 - protein, 275 aa, Bacillus sp. LG1
AQTVPWGIPHIKADKAHAAGVTGSGVKVAILDTGIDANHADLNVKGGASFVSGEPNALQDGNGHGTHVAGTVAALNNTTGVLGVAYNADLYAVKVLSASGSGTLSGIAQGIEWSISNGMNVINMSLGGSSGSTALQQACNNAYNRGIVVIAAAGNSGSSGNRNTMGYPARYSSVIAVGAVSSNNQRASFSSVGSELEVMAPGVNILSTTPGNNYASFNGTSMAAPHVAGAAALIKAKYPSMTNVQIRERLKNTATNLGDPFFYGKGVINVESALQ

SEQ ID NO: 68777 - protein, 275 aa, Bacillus sp. LG1
AQTVPMGIPHIKADKAHAAGVTGSGVKVAILDTGIDANHADLNVKGGASFVSGEPNALQDGNGHGTHVAGTVAALNNTTGVLGVAYNADLYAVKVLSASGSGTLSGIAQGIEWSISNGMNVINMSLGGSSGSTALQQACNNAYNRGIVVIAAAGNSGSSGNRNTMGYPARYSSVIAVGAVSSNNTRASFSSVGSELEVMAPGVNILSTTPGNNYASFNGTSMAAPHVAGAAALIKAKYPSMTNVQIRERLKNTATNLGDPFFYGKGVINVESALQ

SEQ ID NO: 68778 - protein, 275 aa, Bacillus sp. LG1
AQTVPWGIPAIKADKAHAAGVTGSGVKVAILDTGIDANHADLNVKGGASFVSGEPNALQDGNGHGTHVAGTVAALNNTTGVLGVAYNADLYAVKVLSASGSGTLSGIAQGIEWSISNGMNVINMSLGGSSGSTALQQACNNAYNRGIVVIAAAGNSGSSGNRNTMGYPARYSSVIAVGAVSSNNTRASFSSVGSELEVMAPGVNILSTTPGNNYASFNGTSMAAPHVAGAAALIKAKYPSMTNVQIRERLKNTATNLGDPFFYGKGVINVESALQ

SEQ ID NO: 68779 - protein, 275 aa, Bacillus sp. LG1
AQTVPWGIPHIKADKAHAAGVTGSGVKVAILDTGIDANHADLNVKGGASFVSGEPNALQDGNGHGTHVAGTVAALNNTTGVLGVAYNADLYAVKVLSASGSGTLSGIAQGIEWSISNGMNVINMSLGGSSGSTALQQACNNAYNRGIVVIAAAGNSGSSGNRNTMGYPARYSSVIAVGAVSSNNTRASFSSVGSELEVMAPGVNILSTTPQNNYASFNGTSMAAPHVAGAAALIKAKYPSMTNVQIRERLKNTATNLGDPFFYGKGVINVESALQ

SEQ ID NO: 68780 - protein, 275 aa, Bacillus sp. LG1
AQTVPWGIPHIKADKAHAAGVTGSGVKVAILDTGIDANHADLNVKGGASFVSGEPNALQDGNGHGTHVAGTVAALNNTTGVLGVAYNADLYAVKVLSASGSGTLSGIAQGIEWSISNGMNVINMSLGGSSGSTALQQACNNAYNRGIVVIAAAGNSGSSGNRNTMGYPARYSSVIAVGAVSSNNTRASFSSVGSELEVMAPGVNILSTTPGNNYASFNGTSMAAPHVAGAAALIKAKYPSMTNVQIRERLKNTATELGDPFFYGKGVINVESALQ

SEQ ID NO: 68781 - protein, 275 aa, Bacillus sp. LG1
AQTVPWGIPHIKADKAHAAGVTGSGVKVAILDTGIDANHADLNVKGGASFVSGEPNALQDGNGHGTHVAGTVAALNNTTGVLGVAYNADLYAVKVLSASGSGTLSGIAQGIEWSISNGMNVINMSLGGSSGSTALQQACNNAYNRGIVVIAAAGNSGSSGNRNTMGYPARYSSVIAVGAVSSNNTRASFSSVGSELEVMAPGVNISSTTPGNNYASFNGTSMAAPHVAGAAALIKAKYPSMTNVQIRERLKNTATNLGDPFFYGKGVINVESALQ

SEQ ID NO: 68782 - protein, 275 aa, Bacillus sp. LG1
AQTVPWGIPHIKADKAHAAGVTGSGVKVAILDTGIDAIHADLNVKGGASFVSGEPNALQDGNGHGTHVAGTVAALNNTTGVLGVAYNADLYAVKVLSASGSGTLSGIAQGIEWSISNGMNVINMSLGGSSGSTALQQACNNAYNRGIVVIAAAGNSGSSGNRNTMGYPARYSSVIAVGAVSSNNTRASFSSVGSELEVMAPGVNILSTTPGNNYASFNGTSMAAPHVAGAAALIKAKYPSMTNVQIRERLKNTATNLGDPFFYGKGVINVESALQ

SEQ ID NO: 68783 - protein, 275 aa, Bacillus sp. LG1
AQTVPWGIPHIKADKAHAAGVTGSGVKVAILDTGIDANHADLNVKGGASFVSGEPNALQDGNGHGTHVAGTVAALNNTTGVLGVAYNADLYAVKVLSASGSGTLSGIAQGIEWSISNGMNVINMSLGGSSGSTALQQACNNAYNRGIVVIAAAGNSGSSGNRNTMGYPARYSSVIAVGAVSSNNTRASFSSVGSELEVMAPGVNILSTTPGNNYAFFNGTSMAAPHVAGAAALIKAKYPSMTNVQIRERLKNTATNLGDPFFYGKGVINVESALQ

SEQ ID NO: 68784 - protein, 275 aa, Bacillus sp. LG1
AQTVPWGIPHIKADKAHAAGVTGSGVKVAILDTGIDANHADLNVKGGASFVSGEPNALQDGNGHGTHVAGTVAALNNTTGVLGVAYNADLYAVKVLSASGSGTLSGIAQGIEWSISNGMNVINMSLGGSSGSTALQQACNNAYNRGIVVIAAAGNSGSSGNRNTMGYPARYSSVIAVGAVSSNNTRASFSSVGSELEVMAPGVNILSTTPGNNYASFNGTSMAAPHVAGAAALIKAKYPSMTNVQIRERLKNTATNLGDPFFYGKGVINVETALQ

SEQ ID NO: 68785 - protein, 275 aa, Bacillus sp. LG1
AQTVPWGIPHIKADKLHAAGVTGSGVKVAILDTGIDANHADLNVKGGASFVSGEPNALQDGNGHGTHVAGTVAALNNTTGVLGVAYNADLYAVKVLSASGSGTLSGIAQGIEWSISNGMNVINMSLGGSSGSTALQQACNNAYNRGIVVIAAAGNSGSSGNRNTMGYPARYSSVIAVGAVSSNNTRASFSSVGSELEVMAPGVNILSTTPGNNYASFNGTSMAAPHVAGAAALIKAKYPSMTNVQIRERLKNTATNLGDPFFYGKGVINVESALQ

SEQ ID NO: 68786 - protein, 275 aa, Bacillus subtilis
AQVTPWGIEHINAHKAHSSSVTGSGVKVAVLDTGIDASHPDLNVKGGASFISGEPNALVDTNGHGTHVSGTVAALNNNIGVVGVAYNADLYAVKVLSASGSGTLSGIAQGVEWAIANNMDVINMSLGGSSGSTALKQAVDNAYASGIVVVAAAGNSGTRGRQNTMGYPARYSSVIAVGAVDSNNNRASFSSVGAELEVMAPGVSVLSTVPGGGYASYNGTSMASPHVAGAAALIKAKYPSLSASQIRDRLRNTATYLGDPFYYGNGVINVERALQ

SEQ ID NO: 68787 - protein, 275 aa, Bacillus sp. LG1
AQTVPWGIPHIKADKAHAAGVTGSGVKVAILDTGIDANHADLNVKGGASFVSGEPNALQDGNGHGTHVAGTVAALYNTTGVLGVAYNADLYAVKVLSASGSGTLSGIAQGIEWSISNGMNVINMSLGGSSGSTALQQACNNAYNRGIVVIAAAGNSGSSGNRNTMGYPARYSSVIAVGAVSSNNTRASFSSVGSELEVMAPGVNILSTTPGNNYASFNGTSMAAPHVAGAAALIKAKYPSMTNVQIRERLKNTATNLGDPFFYGKGVINVESALQ

SEQ ID NO: 68788 - protein, 275 aa, Bacillus sp. LG1
AQTVPWGIPHIKADKAHAAGVTGSGVKVAILDTGIDANHADLNVKGGASFVSGEPNALQDGNGHGTHVAGTVAALNNTTGVLGVAYNADLYAVKVLSASGSGTLSGIAQGIEWSISNGMNVINMSLGGSSGSTALQQACNNAYNRGIVVIAAAGNSGSSGNRNTMGYPARYSSVIAVGAVSSNNTRASFSSVGSELEVMAPGVNILSTTPGNNYASFNGTSMAAPHVAGAAALIKCKYPSMTNVQIRERLKNTATNLGDPFFYGKGVINVESALQ

SEQ ID NO: 68789 - protein, 275 aa, Bacillus sp. LG1
AQTVPWGIPHIKADKAHAAGVTGSGVKVAILDTGIDANHADLNVKGGASFVSGEPNALQDGNGHGTHVAGTVAALNNTTGVLGVAYNADLYAVKVLSASGSGTLSGIAQGIEWSISNGMNVINMSLGGSSGSTALQQACNNAYNRGIVVIAAAGNSGSSGNRNTMGYPARYSSVIAVGAVSSNNTRASFSSVGSELEVMAPGVNILSTTPGNNYASFNGTSMAAPHVAGAAALIKDKYPSMTNVQIRERLKNTATNLGDPFFYGKGVINVESALQ

SEQ ID NO: 68790 - protein, 275 aa, Bacillus sp. LG1
AQTVPWGIPHIKADKAHAAGVTGSGVKVAILDTGIDANHADLNVKGGASFVSGEPNALQDGNGHGTHVAGTVAALNNTTGVLGVAYNADLYAVKVLSASGSGTLSGIAQGIEWSISNGMNVINMSLGGSSGSTALQQACNNAYNRGIVVIAAAGNSGSSGNRNTMGYPARYSSVIAVGAVSSNNTRASFSSVGVELEVMAPGVNILSTTPGNNYASFNGTSMAAPHVAGAAALIKAKYPSMTNVQIRERLKNTATNLGDPFFYGKGVINVESALQ

SEQ ID NO: 68791 - protein, 275 aa, Bacillus sp. LG1
AQTVPWGIPHIKADKAHAAGVTGSGVKVAILDTGIDANHADLNVKGGASFVSGERNALQDGNGHGTHVAGTVAALNNTTGVLGVAYNADLYAVKVLSASGSGTLSGIAQGIEWSISNGMNVINMSLGGSSGSTALQQACNNAYNRGIVVIAAAGNSGSSGNRNTMGYPARYSSVIAVGAVSSNNTRASFSSVGSELEVMAPGVNILSTTPGNNYASFNGTSMAAPHVAGAAALIKAKYPSMTNVQIRERLKNTATNLGDPFFYGKGVINVESALQ

SEQ ID NO: 68792 - protein, 275 aa, Bacillus subtilis
AQTTPWGITHINAHKAHSSSVTGSGVKVAVLDTGIDASHPDLNVKGGASFISGEPNALVDTNGHGTHVSGTVAALNNNIGVVGVAYNADLYAVKVLSASGSGTLSGIAQGVEWAIANNMDVINMSLGGSSGSTALKQAVDNAYASGIVVVAAAGNSGTRGRQNTMGYPARYSSVIAVGAVDSNNQRASFSSVGAELEVMAPGVSVLSTVPGGGYASYNGTSMASPHVAGAAALIKAKYPSLSASQIRDRLRNTATYLGDPFYYGNGVINVERALQ

SEQ ID NO: 68793 - protein, 275 aa, Bacillus sp. LG1
AQTVPWGIPHIKADKAHAAGVTGSGVKVAILDTGIDANHADLNVKGGASFVSGEPNALQDGNGHGTHVAGTVAALNNTTGVLGVAYNADLYAVKVLSASGSGTLSGIAQGIEWSISNGMNVINMSLGGSSGSTALQQACNNAYNRGIVVIAAAGNSGSSGNRNTMGYPARYSSVIAVGAVSSNNTRASFSSVGSELEVMAPGVNILSTTPGNNYASFNGTSMAAPHVAGAAALIKAKIPSMTNVQIRERLKNTATNLGDPFFYGKGVINVESALQ

SEQ ID NO: 68794 - protein, 275 aa, Bacillus sp. LG1
AQTVPWGIPHIKADKAHAAGVTGSGVKVAILDTGIDANHADLNVKGGASFVSGEPNALQDGNGHGTHVAGTVAALNNTTGVLGVAYNADLYAVKVLSASGSGTLSGIAQGIEWSISNGMNVINMSLGGSSGSTALQQACNNAYVRGIVVIAAAGNSGSSGNRNTMGYPARYSSVIAVGAVSSNNTRASFSSVGSELEVMAPGVNILSTTPGNNYASFNGTSMAAPHVAGAAALIKAKYPSMTNVQIRERLKNTATNLGDPFFYGKGVINVESALQ

SEQ ID NO: 68795 - protein, 275 aa, Bacillus sp. LG1
AQTVPWGIPHIKADKAHAAGVWGSGVKVAILDTGIDANHADLNVKGGASFVSGEPNALQDGNGHGTHVAGTVAALNNTTGVLGVAYNADLYAVKVLSASGSGTLSGIAQGIEWSISNGMNVINMSLGGSSGSTALQQACNNAYNRGIVVIAAAGNSGSSGNRNTMGYPARYSSVIAVGAVSSNNTRASFSSVGSELEVMAPGVNILSTTPGNNYASFNGTSMAAPHVAGAAALIKAKYPSMTNVQIRERLKNTATNLGDPFFYGKGVINVESALQ

SEQ ID NO: 68796 - protein, 275 aa, Bacillus sp. LG1
AQTVPWGIPHIKADKAHAAGVTGSGVKVASLDTGIDANHADLNVKGGASFVSGEPNALQDGNGHGTHVAGTVAALNNTTGVLGVAYNADLYAVKVLSASGSGTLSGIAQGIEWSISNGMNVINMSLGGSSGSTALQQACNNAYNRGIVVIAAAGNSGSSGNRNTMGYPARYSSVIAVGAVSSNNTRASFSSVGSELEVMAPGVNILSTTPGNNYASFNGTSMAAPHVAGAAALIKAKYPSMTNVQIRERLKNTATNLGDPFFYGKGVINVESALQ

SEQ ID NO: 68797 - protein, 275 aa, Bacillus sp. LG1
AQTVPWGIPHIKADKAHAAGVTGSGVKVAILDTGIDANHADLNVKGGASFVSGEPNALQDGNGHGTHVAGTVAALNNTTGVLGVAYNADLYAVKVLSASGSGTLSGIAQGIEWSISNGMNVINMSLGGSSGSTALQQACNNAYNRGIVVIAAAGNSGSSGNRNTMGYPARYSSVIAVGAVSSNNTRASFSSVGSELEVMAPGVNILSTTPGNNYASFNGTSMAAPHVAGAAALIKAKYPSMTNVQIRERLKNTATNLGDPFFYGKGVINVESAFQ

SEQ ID NO: 68798 - protein, 275 aa, Bacillus sp. LG1
AQTVPWGIPHIKADKAHAAGVTGSGVKVAILDTGIDADHADLNVKGGASFVSGEPNALQDGNGHGTHVAGTVAALNNTTGVLGVAYNADLYAVKVLSASGSGTLSGIAQGIEWSISNGMNVINMSLGGSSGSTALQQACNNAYNRGIVVIAAAGNSGSSGNRNTMGYPARYSSVIAVGAVSSNNTRASFSSVGSELEVMAPGVNILSTTPGNNYASFNGTSMAAPHVAGAAALIKAKYPSMTNVQIRERLKNTATNLGDPFFYGKGVINVESALQ

SEQ ID NO: 68799 - protein, 275 aa, Bacillus sp. LG1
AQTVPWGIPHIKADKAHAAGVTGSGVKVAILDTGIDANHADLNVKGGASFVSGEPNALQDGNGHGTHVAGTVAALNNTTGVLGVAYNADLYAVKVLSASGSGTLSGIAQGIEWSISNGMNVINMSLGGSSGSTALQQACNNAYNRGIVVIAAAGNSGSSGNRNTMGYPARYSSVIAVGAVSSNNTRASFSSVGSELEVMAPGVNILSTTPGNNYASFNGTSMAAPHVAGAAALIKAKYPSMTNVQIRERLKNTATNLGDPFFYGKGVINVESALQ

SEQ ID NO: 68800 - protein, 275 aa, Bacillus sp. LG1
AQTVPWGIPHIKADKAHAAGVTGSGVKVAILDTGIDANHADLNVKGGASFVSGEPNALQDGNGHGTHVAGTVAALNNTTGVLGVAYNADLYAVKVLSASGSGTLSGIAQGIEWSISNGMNVINMSLGGSSGSTALQQACNNAYNRGIVVIAAAGNSGSSGNRNTMGYPARYSSVIAVGAVSSNNTRASFSSVGSELEVMAPGVNILSTRPGNNYASFNGTSMAAPHVAGAAALIKAKYPSMTNVQIRERLKNTATNLGDPFFYGKGVINVESALQ

SEQ ID NO: 68801 - protein, 275 aa, Bacillus sp. LG1
AQTVPWGIPHIKADKAHAAGVTGSGVKVAILDTGIDANHADLNVKGGASFVSGEPNALQDGNGHGTHVAGTVAALNNTTGVLGVAYNADLYAVKVLSASGSGTLSGIAQGIEWSISNGMNVINMSLGGSSGSTALQQACNNAYNRGIVVIAAAGNSGSSGNRNTMGYPARYSSVIAVGAVSSNNTRASFSSVGGELEVMAPGVNILSTTPGNNYASFNGTSMAAPHVAGAAALIKAKYPSMTNVQIRERLKNTATNLGDPFFYGKGVINVESALQ

SEQ ID NO: 68802 - protein, 275 aa, Bacillus sp. LG1
AQTVPWGIPHIKADKAHAAGVTGSGVKVAILDTGIDANHADLNVKGGASFVSGEPNALQDGNGHGTHVAGTVAALNNTTGVLGVAYNADLYAVKVLSMSGSGTLSGIAQGIEWSISNGMNVINMSLGGSSGSTALQQACNNAYNRGIVVIAAAGNSGSSGNRNTMGYPARYSSVIAVGAVSSNNTRASFSSVGSELEVMAPGVNILSTTPGNNYASFNGTSMAAPHVAGAAALIKAKYPSMTNVQIRERLKNTATNLGDPFFYGKGVINVESALQ

SEQ ID NO: 68803 - protein, 275 aa, Bacillus sp. LG1
AQTVPWGIPHIKADKAHAAGVTGSGVKVAILDTGIDANHADLNVKGGASFVSGEPNALQDGNGHGTHVAGTVAALNNTTGVLGVAYQADLYAVKVLSASGSGTLSGIAQGIEWSISNGMNVINMSLGGSSGSTALQQACNNAYNRGIVVIAAAGNSGSSGNRNTMGYPARYSSVIAVGAVSSNNTRASFSSVGSELEVMAPGVNILSTTPGNNYASFNGTSMAAPHVAGAAALIKAKYPSMTNVQIRERLKNTATNLGDPFFYGKGVINVESALQ

SEQ ID NO: 68804 - protein, 275 aa, Bacillus sp. LG1
AQTVPWGIPHIKADKAHAAGVTGSGVKVAILDTGIDANHADLNVKGGASFVSGEPNALQDGNGHGTHVAGTVAALNNTTGVLGVAYNADLYAVKVLSASGSGTLSGIAQGIEWSISNGMNVINMSLGGSSGSTALQQACNNAYNRGSVVIAAAGNSGSSGNRNTMGYPARYSSVIAVGAVSSNNTRASFSSVGSELEVMAPGVNILSTTPGNNYASFNGTSMAAPHVAGAAALIKAKYPSMTNVQIRERLKNTATNLGDPFFYGKGVINVESALQ

SEQ ID NO: 68805 - protein, 275 aa, Bacillus sp. LG1
AQTVPKGIPHIKADKAHAAGVTGSGVKVAILDTGIDANHADLNVKGGASFVSGEPNALQDGNGHGTHVAGTVAALNNTTGVLGVAYNADLYAVKVLSASGSGTLSGIAQGIEWSISNGMNVINMSLGGSSGSTALQQACNNAYNRGIVVIAAAGNSGSSGNRNTMGYPARYSSVIAVGAVSSNNTRASFSSVGSELEVMAPGVNILSTTPGNNYASFNGTSMAAPHVAGAAALIKAKYPSMTNVQIRERLKNTATNLGDPFFYGKGVINVESALQ

SEQ ID NO: 68806 - protein, 275 aa, Bacillus sp. LG1
AQTVPWGIPHIKADKAHAAGVTGSGVKVAILDTGIDANHADLNVKGGASFVSGEPNALQDGNGHGTHVAGTVAALNNTTGVLGVAYNADLYAVKVLSASGSGTLSGIAQGIEWSISNGMNVINMSLGGSSGSTALQQACNNAYNRGIVVIAAAGNSGSSGNRNTMGYPARYSSVIAVGAVSSNNTRASFSSVGSELEVMAPGVNILSTTPGNNYASFNGTSMAAPHVAGAAALIKQKYPSMTNVQIRERLKNTATNLGDPFFYGKGVINVESALQ

SEQ ID NO: 68807 - protein, 275 aa, Bacillus sp. LG1
AQTVPWGIPHIKADKAHAAGVTGSGVKVAILDTGIDANHADLNVKGGASFVSGEPNALQDGNGHGTHVAGTVAALNNTTGVLGVAYNADLYAVKVLSASGSGTLSGIAQGIEWSISNGMNVINMSLGGSSGSTALQQACNNAYNRGIVVIAAAGNSGSSGNRNTMGYPARYSSVIAVGAVSSNATRASFSSVGSELEVMAPGVNILSTTPGNNYASFNGTSMAAPHVAGAAALIKAKYPSMTNVQIRERLKNTATNLGDPFFYGKGVINVESALQ

SEQ ID NO: 68808 - protein, 275 aa, Bacillus sp. LG1
AQTVPWGIPHIKADKAHAAGHTGSGVKVAILDTGIDANHADLNVKGGASFVSGEPNALQDGNGHGTHVAGTVAALNNTTGVLGVAYNADLYAVKVLSASGSGTLSGIAQGIEWSISNGMNVINMSLGGSSGSTALQQACNNAYNRGIVVIAAAGNSGSSGNRNTMGYPARYSSVIAVGAVSSNNTRASFSSVGSELEVMAPGVNILSTTPGNNYASFNGTSMAAPHVAGAAALIKAKYPSMTNVQIRERLKNTATNLGDPFFYGKGVINVESALQ

SEQ ID NO: 68809 - protein, 275 aa, Bacillus sp. LG1
AQTVPWGIPHIKADKAHAAGVTGSGVKVAILDTGIDANHADLNVKGGASFVSGEPNALQDGNGHGTHVAGTVAALNNTTGVLGVAYNADLYAVKVLSASGSGTLSGIAQGIEWSISNGMNVINMSLGGSSGSTALQQACNNAYNRGIVVIAAAGNSGSSGNRNTMGYPARYSSVIAVGAVSSNNTRASFSSVGSELEVMAPGVNILSTTPDNNYASFNGTSMAAPHVAGAAALIKAKYPSMTNVQIRERLKNTATNLGDPFFYGKGVINVESALQ

SEQ ID NO: 68810 - protein, 275 aa, Bacillus sp. LG1
AQTVPWGIPHIKADKAHAAGVTGSGVKVAILDTGIDANHADLNVKGGASFVSGEKNALQDGNGHGTHVAGTVAALNNTTGVLGVAYNADLYAVKVLSASGSGTLSGIAQGIEWSISNGMNVINMSLGGSSGSTALQQACNNAYNRGIVVIAAAGNSGSSGNRNTMGYPARYSSVIAVGAVSSNNTRASFSSVGSELEVMAPGVNILSTTPGNNYASFNGTSMAAPHVAGAAALIKAKYPSMTNVQIRERLKNTATNLGDPFFYGKGVINVESALQ

SEQ ID NO: 68811 - protein, 275 aa, Bacillus sp. LG1
AQTVPWGIPHIKADKAHAAGVTGSGVKVAILDTGIDANHADLNVKGGASFVSGEPNALQDGNGHGTHVAGTVAALNNTTGVLGVAYNADLYAVKVLSASGSGTLSGIAQGIEWSISNGMNVINMSLGGSSGSTALQQACNNAYNRGIVVIAAAGNSGSSGNRNTMGYPARYSSVIAVGAVSSNNTRASFSSVGSELEVMAPGVNIMSTTPGNNYASFNGTSMAAPHVAGAAALIKAKYPSMTNVQIRERLKNTATNLGDPFFYGKGVINVESALQ

SEQ ID NO: 68812 - protein, 275 aa, Bacillus sp. LG1
AQTVPWGIPHIKADKAHAAGVTGSGVKVAILDTGIDANHADLNVKGGASFVSGEPNALQDGNGHGTHVAGTVAALNNTTGVLGVAYNADLYAVKVLSASGSGTLSGIAQGIEWSISNGMNVINMSLGGSSGSTALQQACNNAYNRGIVVIAAAGNSGSSGNRNTMGYPARYSSVIAVGAVHSNNTRASFSSVGSELEVMAPGVNILSTTPGNNYASFNGTSMAAPHVAGAAALIKAKYPSMTNVQIRERLKNTATNLGDPFFYGKGVINVESALQ

SEQ ID NO: 68813 - protein, 275 aa, Bacillus sp. LG1
AQTVPWGIPHIKADKAHAAGVTGSGVKVAILDTGIDANHADLNVKGGASFVSGEPNALQDGNGHGTHVAGTVAALNNTTGVLGVAYNADLYAVKVLSASGSGTLSGIAQGIEWSISNGMNVINMSLGGSSGSTALQQACNNAYNRGIVVIAAAGNSGSSGNRNTMGYPARYSSVIAVGAVSSNNTRASFSSVGSELEVMAPGVNILSTTPGNNYASFNGTSMAAPHVAGAAALIKAKYPSMTNVQIRERLKNTATNLGDVFFYGKGVINVESALQ

SEQ ID NO: 68814 - protein, 275 aa, Bacillus sp. LG1
AQTVPWGIPHIKADKAHAAGVTGGGVKVAILDTGIDANHADLNVKGGASFVSGEPNALQDGNGHGTHVAGTVAALNNTTGVLGVAYNADLYAVKVLSASGSGTLSGIAQGIEWSISNGMNVINMSLGGSSGSTALQQACNNAYNRGIVVIAAAGNSGSSGNRNTMGYPARYSSVIAVGAVSSNNTRASFSSVGSELEVMAPGVNILSTTPGNNYASFNGTSMAAPHVAGAAALIKAKYPSMTNVQIRERLKNTATNLGDPFFYGKGVINVESALQ

SEQ ID NO: 68815 - protein, 275 aa, Bacillus sp. LG1
AQTVPWGIPHIKADKAVAAGVTGSGVKVAILDTGIDANHADLNVKGGASFVSGEPNALQDGNGHGTHVAGTVAALNNTTGVLGVAYNADLYAVKVLSASGSGTLSGIAQGIEWSISNGMNVINMSLGGSSGSTALQQACNNAYNRGIVVIAAAGNSGSSGNRNTMGYPARYSSVIAVGAVSSNNTRASFSSVGSELEVMAPGVNILSTTPGNNYASFNGTSMAAPHVAGAAALIKAKYPSMTNVQIRERLKNTATNLGDPFFYGKGVINVESALQ

SEQ ID NO: 68816 - protein, 275 aa, Bacillus sp. LG1
AQTVPWGIPHIKADKAHAAGVTGSGVKVAILDTGIDANHADLNVKGGASFVSGEPNALQDGNGHGTHVAGTVAALNNTTGVLGVAYNADLYAVKVLSASGSGTLSGIAQGIEWSISNGMNVINMSLGGSSGSTALQQACNNAYNRGIVVIAAAGNSGSSGNRNTMGYPARYSSVIAVGAVSSNNTRASFSSVGSELEVMAPGVNILSTTPGNNYASFNGTSMAAPHVAGAAALIKAKYPSMKNVQIRERLKNTATNLGDPFFYGKGVINVESALQ

SEQ ID NO: 68817 - protein, 275 aa, Bacillus sp. LG1
AQTVPWGIPHIKADKAHAAGVTGSGVKVAILDTGIDANHADLNVKGGASFVSGEPNALQDGNGHGTHVAGTVAALNNTTGVLGVAYNADLYAVKVLSASGSGTLSGIAQGIEWSISNGMNVINMSLGGSSGSTALQQACNNAYNRGIVVIAAAGNSGSSGNRNTMGYPARYLSVIAVGAVSSNNTRASFSSVGSELEVMAPGVNILSTTPGNNYASFNGTSMAAPHVAGAAALIKAKYPSMTNVQIRERLKNTATNLGDPFFYGKGVINVESALQ

SEQ ID NO: 68818 - protein, 275 aa, Bacillus sp. LG1
AQTVPWGIPHIKADKAHAAGVTGSGVKVAILDTGIDANHADLNVKGGASFVSGEPNALQDGNGHGTHVAGTVAALNNTTGVLGVAYNADLYAVKVLSASGSGTLSGIAQGIEWSISNGMNVINMSLGGSSGSTALQQACNNAYNRGIVVIAAAGNSGSSGNRNTMGYPARYSSVIAVGAVSSNNTRASFSSVGSELEVMAPGVNILSTTPGNNYASFNGTSMAAPHVAGAAALIKAKYPSMTNVQIRHRLKNTATNLGDPFFYGKGVINVESALQ

SEQ ID NO: 68819 - protein, 275 aa, Bacillus sp. LG1
AQTVPWGIPHIKADKAHAAGVTGSGVKVAILDTGIDANHADLNVKGGASFVSGEPNALQDGNGHGTHVAGTVAALNNTTGVLGVADNADLYAVKVLSASGSGTLSGIAQGIEWSISNGMNVINMSLGGSSGSTALQQACNNAYNRGIVVIAAAGNSGSSGNRNTMGYPARYSSVIAVGAVSSNNTRASFSSVGSELEVMAPGVNILSTTPGNNYASFNGTSMAAPHVAGAAALIKAKYPSMTNVQIRERLKNTATNLGDPFFYGKGVINVESALQ

SEQ ID NO: 68820 - protein, 275 aa, Bacillus subtilis
AQVTPWGITHINAHKAHSSSVTGSGVKVAVLDTGIDASHEDLNVKGGASFISGEPNALVDTNGHGTHVAGTVAALNNTIGVVGVAYNADLYAVKVLSASGSGTLSGIAQGVEWAIANNMDVINMSLGGSSGSTALKQAVDNAYASGIVVVAAAGNSGTRGRQNTMQYPARYSSVIAVGAVDSNNNRASFSSVGAELEVMAPGVSVLSTVPGGGYASYNGTSMASPHVAGAAALIKAKYPSLSASQIRDRLRNTATYLGDPFYYGNGVINVERALQ

SEQ ID NO: 68821 - protein, 275 aa, Bacillus sp. LG1
AQTVPWGIPHIKADKAHAAGVTGSGVKVAILDTGIDANHADLNVKGGASFVSGEPNALQDGNGHGTHVAGTVAALNNTTGVLGVAYNADLYAVKVLSASGSGTLSGIAQGIEWSISNGMNVINMSLGGSSGSTALQQACNNAYNRGIVVIAAAGNSGSSGNRNTMGYPARYSSVIAVGAVSSNNRRASFSSVGSELEVMAPGVNILSTTPGNNYASFNGTSMAAPHVAGAAALIKAKYPSMTNVQIRERLKNTATNLGDPFFYGKGVINVESALQ

SEQ ID NO: 68822 - protein, 275 aa, Bacillus sp. LG1
AQTVPWGIPHIKADKAHAAGVTGSGVKVAILDTGIDANHADLNVKGGASFVSGEPNALQDGNGHGTHVAGTVAALNNTTGVLGVAYNADLYAVKVLYASGSGTLSGIAQGIEWSISNGMNVINMSLGGSSGSTALQQACNNAYNRGIVVIAAAGNSGSSGNRNTMGYPARYSSVIAVGAVSSNNTRASFSSVGSELEVMAPGVNILSTTPGNNYASFNGTSMAAPHVAGAAALIKAKYPSMTNVQIRERLKNTATNLGDPFFYGKGVINVESALQ

SEQ ID NO: 68823 - protein, 275 aa, Bacillus sp. LG1
AQTVPWGIPHIKADKAHAAGVTGSGVKVAILDTGIDANHADLNVKGGASFVSGESNALQDGNGHGTHVAGTVAALNNTTGVLGVAYNADLYAVKVLSASGSGTLSGIAQGIEWSISNGMNVINMSLGGSSGSTALQQACNNAYNRGIVVIAAAGNSGSSGNRNTMGYPARYSSVIAVGAVSSNNTRASFSSVGSELEVMAPGVNILSTTPGNNYASFNGTSMAAPHVAGAAALIKAKYPSMTNVQIRERLKNTATNLGDPFFYGKGVINVESALQ

SEQ ID NO: 68824 - protein, 275 aa, Bacillus sp. LG1
AQTVPWGIPHIKADKAHAAGVTGSGVKVAILDTGIDANHADLNVKGGASFVSGEPNILQDGNGHGTHVAGTVAALNNTTGVLGVAYNADLYAVKVLSASGSGTLSGIAQGIEWSISNGMNVINMSLGGSSGSTALQQACNNAYNRGIVVIAAAGNSGSSGNRNTMGYPARYSSVIAVGAVSSNNTRASFSSVGSELEVMAPGVNILSTTPGNNYASFNGTSMAAPHVAGAAALIKAKYPSMTNVQIRERLKNTATNLGDPFFYGKGVINVESALQ

SEQ ID NO: 68825 - protein, 275 aa, Bacillus sp. LG1
AQTVPWGIPHIKADKAHAAGVTGSGVKVAILDTGIDANHADLNVKGGASFVSGEPNALQDGNGHGTHVAGTVAALNNTTGVLGVAYNADLYAVKVLSASGSGTLSGIAQGIEWSISNGMNVINMSLGGSSGSTALQQACNNAYNRGIVVIAAAGNSGSSGNRNTMGYPARYSSVIAVGAVSSNNTRASFSSVGSELEVMAPGVNILSTTPGNNYASFNGTSMAAPHVAGAAALIKAKYPSMYNVQIRERLKNTATNLGDPFFYGKGVINVESALQ

SEQ ID NO: 68826 - protein, 275 aa, Bacillus sp. LG1
AQTVPWGIPHIKADKAHAAGVTGSGVKVAILDTGIDANHADLNVKGGASFVSGEPNALQDGNGHGTHVAGTVAALNNTTGVLGVAYNADLYAVKVLSASGSGTLSGIAQGIEWSISNGMNVINMSLGGSSGSTALFQACNNAYNRGIVVIAAAGNSGSSGNRNTMGYPARYSSVIAVGAVSSNNTRASFSSVGSELEVMAPGVNILSTTPGNNYASFNGTSMAAPHVAGAAALIKAKYPSMTNVQIRERLKNTATNLGDPFFYGKGVINVESALQ

SEQ ID NO: 68827 - protein, 275 aa, Bacillus subtilis
AQTTPWGIEHINAHKAHSSSVTGSGVKVAVLDTGIDASHPDLNVKGGASFISGEPNALVDTNGHGTHVAGTVAALNNNIGVVGVAYNADLYAVKVLSASGSGTLSGIAQGVEWAIANNMDVINMSLGGSSGSTALKQAVDNAYASGIVVVAAAGNSGTRGRQNTMQYPARYSSVIAVGAVDSNNQRASFSSVGAELEVMAPGVSVLSTVPGGGYASYNGTSMASPHVAGAAALIKAKYPSLSASQIRDRLRNTATYLGDPFYYGNGVINVERALQ

SEQ ID NO: 68828 - protein, 275 aa, Bacillus sp. LG1
AQTVPWGIPHIKADKAHAAGVTGSGVKVAILDTGIDANHADLNVKGGASFVSGEPNALQDGNGHGTHVAGTVAALNNTTGVLGVAYNADLYAVKVLSASGSGTLSGIAQGIEWSISNGMNVINMSLGGSSGSTALQQACNNAYNRGIVVIAAAGNSGSSGNRNTMGYPARYSSVIAVGAVSSNNTRASFSSVGSELEVMAPGVNILSTTPGNNYASFNGTSMAAPHVAGAAALIKAKYPWMTNVQIRERLKNTATNLGDPFFYGKGVINVESALQ

SEQ ID NO: 68829 - protein, 275 aa, Bacillus sp. LG1
AQTVPWGIPHIKADKAHAAGVTGSGVKVAILDTGIDANHWDLNVKGGASFVSGEPNALQDGNGHGTHVAGTVAALNNTTGVLGVAYNADLYAVKVLSASGSGTLSGIAQGIEWSISNGMNVINMSLGGSSGSTALQQACNNAYNRGIVVIAAAGNSGSSGNRNTMGYPARYSSVIAVGAVSSNNTRASFSSVGSELEVMAPGVNILSTTPGNNYASFNGTSMAAPHVAGAAALIKAKYPSMTNVQIRERLKNTATNLGDPFFYGKGVINVESALQ

SEQ ID NO: 68830 - protein, 275 aa, Bacillus sp. LG1
AQTVPWGIPHIKADKAHAAGVTGSGVKVAILDTGIDANHADLNVKGGASFVSGEPNALQDGNGHGTHVAGTVAALNNTTGVLGVAYNADLYAVKVLSASGSGTLSGIAQGIEWSISNGMNVINMSLGGSSGSTALQQACNNAYNRGIVVIAAAGNSGSSGNRNTMGYPARYSSVIAVGAVSSNNTRASFSSVGSELEVMAPGVNILSTTPGNNYASFNGTSMAAPHVAGAAALIKAKYPSMTKVQIRERLKNTATNLGDPFFYGKGVINVESALQ

SEQ ID NO: 68831 - protein, 275 aa, Bacillus sp. LG1
AQTVPWGIPHIKADKAHAAGVTGSGVKVAILDTGIDANHADLNVWGGASFVSGEPNALQDGNGHGTHVAGTVAALNNTTGVLGVAYNADLYAVKVLSASGSGTLSGIAQGIEWSISNGMNVINMSLGGSSGSTALQQACNNAYNRGIVVIAAAGNSGSSGNRNTMGYPARYSSVIAVGAVSSNNTRASFSSVGSELEVMAPGVNILSTTPGNNYASFNGTSMAAPHVAGAAALIKAKYPSMTNVQIRERLKNTATNLGDPFFYGKGVINVESALQ

SEQ ID NO: 68832 - protein, 275 aa, Bacillus sp. LG1
AQTVPWGIPHIKADKAHAAGVTGSAVKVAILDTGIDANHADLNVKGGASFVSGEPNALQDGNGHGTHVAGTVAALNNTTGVLGVAYNADLYAVKVLSASGSGTLSGIAQGIEWSISNGMNVINMSLGGSSGSTALQQACNNAYNRGIVVIAAAGNSGSSGNRNTMGYPARYSSVIAVGAVSSNNTRASFSSVGSELEVMAPGVNILSTTPGNNYASFNGTSMAAPHVAGAAALIKAKYPSMTNVQIRERLKNTATNLGDPFFYGKGVINVESALQ

SEQ ID NO: 68833 - protein, 275 aa, Bacillus sp. LG1
AQTVPWGIPHIKADKAHAAGVTGSGVKVAILDTGIDANHADLNVKGGASFVSGEPNALQDGNGHGTHVAGTVAALNNTTGVLGVAYNADLYAVKVLSASGSGTLSGIAQGIEWSISNGMNVINMSLGGSSGSTALQQACNNAYNRGIVVIAAAGNSGSSGNRNTMGYPARYSSVIAVGAVSSNNTRASFSSVGSELEVMAPGVNILSTTPGNNYASFNGTSMAAPHVAGAAALIKAKYPSMANVQIRERLKNTATNLGDPFFYGKGVINVESALQ

SEQ ID NO: 68834 - protein, 275 aa, Bacillus sp. LG1
AQTVPWGIPHIKADKAHAAGVTGSGVKVAILDTGIDANHADLNVKGGASFVSGEPNALQDGNGHGTHVAGTVAALNNTTGVLGVAYNADLYAVKVLSASGSGTLSGIAQGIEWSISNGMNVINMSLGGSSGSTALQQACNNAYNRGIVVIAAAGNSGSSGNRNTMGYPARYSSVIAVGAVSSNNTRASFSSVGSELEVMAPGVNILSTSPGNNYASFNGTSMAAPHVAGAAALIKAKYPSMTNVQIRERLKNTATNLGDPFFYGKGVINVESALQ

SEQ ID NO: 68835 - protein, 275 aa, Bacillus sp. LG1
AQTVPWGIPHIKADKAHAAGVTGSGVKVAILDTGIDANHADLNVKGGASFVSGEPNALQDGNGHGTHVAGTVAALNNTTGVLGVAYNADLYAVKVLSASGSGTLSGIAQGIEWSISNGMGVINMSLGGSSGSTALQQACNNAYNRGIVVIAAAGNSGSSGNRNTMGYPARYSSVIAVGAVSSNNTRASFSSVGSELEVMAPGVNILSTTPGNNYASFNGTSMAAPHVAGAAALIKAKYPSMTNVQIRERLKNTATNLGDPFFYGKGVINVESALQ

SEQ ID NO: 68836 - protein, 275 aa, Bacillus sp. LG1
AQTVPWGIPHIKADKAHAAGVTGSGVKVAILDTGIDAHHADLNVKGGASFVSGEPNALQDGNGHGTHVAGTVAALNNTTGVLGVAYNADLYAVKVLSASGSGTLSGIAQGIEWSISNGMNVINMSLGGSSGSTALQQACNNAYNRGIVVIAAAGNSGSSGNRNTMGYPARYSSVIAVGAVSSNNTRASFSSVGSELEVMAPGVNILSTTPGNNYASFNGTSMAAPHVAGAAALIKAKYPSMTNVQIRERLKNTATNLGDPFFYGKGVINVESALQ

SEQ ID NO: 68837 - protein, 275 aa, Bacillus sp. LG1
AQTVPWGIPHIKADKAHAAGVTGSGVKVAILDTGIDANHADLNVSGGASFVSGEPNALQDGNGHGTHVAGTVAALNNTTGVLGVAYNADLYAVKVLSASGSGTLSGIAQGIEWSISNGMNVINMSLGGSSGSTALQQACNNAYNRGIVVIAAAGNSGSSGNRNTMGYPARYSSVIAVGAVSSNNTRASFSSVGSELEVMAPGVNILSTTPGNNYASFNGTSMAAPHVAGAAALIKAKYPSMTNVQIRERLKNTATNLGDPFFYGKGVINVESALQ

SEQ ID NO: 68838 - protein, 275 aa, Bacillus sp. LG1
AQTVPWGIPHIKADKAHAAGVTGSHVKVAILDTGIDANHADLNVKGGASFVSGEPNALQDGNGHGTHVAGTVAALNNTTGVLGVAYNADLYAVKVLSASGSGTLSGIAQGIEWSISNGMNVINMSLGGSSGSTALQQACNNAYNRGIVVIAAAGNSGSSGNRNTMGYPARYSSVIAVGAVSSNNTRASFSSVGSELEVMAPGVNILSTTPGNNYASFNGTSMAAPHVAGAAALIKAKYPSMTNVQIRERLKNTATNLGDPFFYGKGVINVESALQ

SEQ ID NO: 68839 - protein, 275 aa, Bacillus sp. LG1
AQTVPWGIPHIKADKAHAAGVTGSGVKVAILDTGIDANHADLNVKGGASFVDGEPNALQDGNGHGTHVAGTVAALNNTTGVLGVAYNADLYAVKVLSASGSGTLSGIAQGIEWSISNGMNVINMSLGGSSGSTALQQACNNAYNRGIVVIAAAGNSGSSGNRNTMGYPARYSSVIAVGAVSSNNTRASFSSVGSELEVMAPGVNILSTTPGNNYASFNGTSMAAPHVAGAAALIKAKYPSMTNVQIRERLKNTATNLGDPFFYGKGVINVESALQ

SEQ ID NO: 68840 - protein, 275 aa, Bacillus sp. LG1
AQTVPWGIPHIKADKAHAAGVTGSGVKVAILDTGIDANHADLNVKGGASFVSGEPNALQDGNGHGTHVAGTVAALNNTTGVLGVAYNADLYAVKVLSASGSGGLSGIAQGIEWSISNGMNVINMSLGGSSGSTALQQACNNAYNRGIVVIAAAGNSGSSGNRNTMGYPARYSSVIAVGAVSSNNTRASFSSVGSELEVMAPGVNILSTTPGNNYASFNGTSMAAPHVAGAAALIKAKYPSMTNVQIRERLKNTATNLGDPFFYGKGVINVESALQ

SEQ ID NO: 68841 - protein, 275 aa, Bacillus subtilis
AQVTPWGITHINAHKAHSSSVTGSGVKVAVLDTGIDASHPDLNVKGGASFISGEPNALVDTNGHGTHVSGTVAALNNNIGVVGVAYNADLYAVKVLSASGSGTLSGIAQGVEWAIANNMDVINMSLGGSSGSTALKQAVDNAYASGIVVVAAAGNSGTRGRQNTMGYPARYSSVIAVGAVDSNNNRASFSSVGAELEVMAPGVSVLSTVPGGGYASYNGTSMASPHVAGAAALIKAKYPSLSASQIRDRLRNTATYLGDPFYYGNGVINVERALQ

SEQ ID NO: 68842 - protein, 275 aa, Bacillus sp. LG1
AQTVPWGIPHIKADKAHAAGVTGTGVKVAILDTGIDANHADLNVKGGASFVSGEPNALQDGNGHGTHVAGTVAALNNTTGVLGVAYNADLYAVKVLSASGSGTLSGIAQGIEWSISNGMNVINMSLGGSSGSTALQQACNNAYNRGIVVIAAAGNSGSSGNRNTMGYPARYSSVIAVGAVSSNNTRASFSSVGSELEVMAPGVNILSTTPGNNYASFNGTSMAAPHVAGAAALIKAKYPSMTNVQIRERLKNTATNLGDPFFYGKGVINVESALQ

SEQ ID NO: 68843 - protein, 275 aa, Bacillus sp. LG1
AQTVPWGIPHIKADKAHAAGVTGSGVKVAILDTGIDANHADLNVKGGASFVSGEPNALQDGNGHGTHVAGTVAALNNTTGVLGVAYNADLYAVKVLSASGSGTLSGIAQGIEWSISNGMNVINMSLGGSSGSTALQQACNNAYNRGIVVIAAAGNSGSSGNRNTMGYPARYSSVIAVGAVSSNNTRASFSSVGSELEVMAPGVNILSTTPGNEYASFNGTSMAAPHVAGAAALIKAKYPSMTNVQIRERLKNTATNLGDPFFYGKGVINVESALQ

SEQ ID NO: 68844 - protein, 275 aa, Bacillus sp. LG1
AQTVPWGIPHIKADKAHAAGVTGSGVKVAILDTGIDANHADLNVKGGASFVSGEPNALQDGNGHGTHVAGTVAALNNTTGVLGVAYNADLYAVKVLSASGSGTLSGIAQGIEWSISNGMNVINMSLGGSSGSTALQQACNNAYNRGIVVIAAAGNSGSSGNRNTMGYPARYSSVIAVGAVSSNNTRASFSSVGSELEVMAPGVNILSTTPGNNYASFNGTSMAAPHVAGAAALIKAKYPSMTNVQIRERLKNTATNLGDPFFYGKGVINVESAGQ

SEQ ID NO: 68845 - protein, 275 aa, Bacillus sp. LG1
AQTVPWGIPHIKADKAHAYGVTGSGVKVAILDTGIDANHADLNVKGGASFVSGEPNALQDGNGHGTHVAGTVAALNNTTGVLGVAYNADLYAVKVLSASGSGTLSGIAQGIEWSISNGMNVINMSLGGSSGSTALQQACNNAYNRGIVVIAAAGNSGSSGNRNTMGYPARYSSVIAVGAVSSNNTRASFSSVGSELEVMAPGVNILSTTPGNNYASFNGTSMAAPHVAGAAALIKAKYPSMTNVQIRERLKNTATNLGDPFFYGKGVINVESALQ

SEQ ID NO: 68846 - protein, 275 aa, Bacillus sp. LG1
AQTVPWGIPHIKADKAHAAGVTGSGVKVAILDTGIDANHADLNVKGGASFVSGEPNALQDGNGHGTHVAGTVAALNNTTGVLGVAYNADLYAVKVLSASGSGELSGIAQGIEWSISNGMNVINMSLGGSSGSTALQQACNNAYNRGIVVIAAAGNSGSSGNRNTMGYPARYSSVIAVGAVSSNNTRASFSSVGSELEVMAPGVNILSTTPGNNYASFNGTSMAAPHVAGAAALIKAKYPSMTNVQIRERLKNTATNLGDPFFYGKGVINVESALQ

SEQ ID NO: 68847 - protein, 275 aa, Bacillus sp. LG1
AQTVPLGIPHIKADKAHAAGVTGSGVKVAILDTGIDANHADLNVKGGASFVSGEPNALQDGNGHGTHVAGTVAALNNTTGVLGVAYNADLYAVKVLSASGSGTLSGIAQGIEWSISNGMNVINMSLGGSSGSTALQQACNNAYNRGIVVIAAAGNSGSSGNRNTMGYPARYSSVIAVGAVSSNNTRASFSSVGSELEVMAPGVNILSTTPGNNYASFNGTSMAAPHVAGAAALIKAKYPSMTNVQIRERLKNTATNLGDPFFYGKGVINVESALQ

SEQ ID NO: 68848 - protein, 275 aa, Bacillus subtilis
AQVTPWGITHINAHKAHSSSVTGSGVKVAVLDTGIDASHPDLNVKGGASFISGEPNALVDTNGHGTHVAGTVAALNNTIGVVGVAYNADLYAVKVLSASGSGTLSGIAQGVEWAIANNMDVINMSLGGSSGSTALKQAVDNAYASGIVVVAAAGNSGTRGRQNTMGYPARYSSVIAVGAVDSNNQRASFSSVGAELEVMAPGVSVLSTVPGGGYASYSGTSMASPHVAGAAALIKAKYPSLSASQIRDRLRNTATYLGDPFYYGNGVINVERALQ

SEQ ID NO: 68849 - protein, 275 aa, Bacillus sp. LG1
AQTVPWGIPHIKADKAHAAGVTGSGVKVAILDTGIDANHADLNVKGGASFVSGEPNALQDGNGHGTHVAGTVAALNNTTGVLGVAYNADLYAVKVLSASGSGTLSGIAQGIEWSISNGMNVINMSLGGSSGSTALQQACNNAYNRGIVVLAAAGNSGSSGNRNTMGYPARYSSVIAVGAVSSNNTRASFSSVGSELEVMAPGVNILSTTPGNNYASFNGTSMAAPHVAGAAALIKAKYPSMTNVQIRERLKNTATNLGDPFFYGKGVINVESALQ

SEQ ID NO: 68850 - protein, 275 aa, Bacillus sp.
AQTVPWGIPHIKADKAHASGVTGSGVKVAVLDTGIDANHADLNVKGGASFVSGEPNALQDGNGHGTHVAGTVAALNNTTGVLGVAYNADLYAVKVLSASGSGTLSGIAQGIEWSIANDMDVINMSLGGSTGSTALQQACDNAYASGIVVVAAAGNSGSKGKRNTMGYPARYSSVIAVGAVDSSNNRASFSSVGSELEVMAPGVSILSTTPGNNYSSFNGTSMASPHVAGAAALIKAKYPSMTNVQIREKLKNTATNLGDAFYYGHGVINVESALQ

SEQ ID NO: 68851 - protein, 275 aa, Bacillus sp. LG1
AQTVPWGIPHIKADKAHAAGVTGSGVKVAILDTGIDANHADLNVKGGASFVSGEPNALQDGNGHGTHVAGTVAALNNTTGVLGVAYNADLYAVKVLSASGSGTLSGIAQGIEWSISNGMNVINMSLGGSSGSTALQQACNNAYNRGIVVIAAAGNSGSSGNRNTMGYPARYSSVIAVGAVSSNNTRASFSSVGSELEVMAPGVNILSTTPGNNYASFNGTSMAAPHVAGAAALIKAKYPSMTNVQIRERLKNTATRLGDPFFYGKGVINVESALQ

SEQ ID NO: 68852 - protein, 275 aa, Bacillus sp. LG1
AQTVPWGIPHIKADKAHAAGVTGSGVKVAILDTGIDANHADLNVKGGASFVSGEPNALQDGNGHGTHVAGTVAALNNTTGVLGVAYNATLYAVKVLSASGSGTLSGIAQGIEWSISNGMNVINMSLGGSSGSTALQQACNNAYNRGIVVIAAAGNSGSSGNRNTMGYPARYSSVIAVGAVSSNNTRASFSSVGSELEVMAPGVNILSTTPGNNYASFNGTSMAAPHVAGAAALIKAKYPSMTNVQIRERLKNTATNLGDPFFYGKGVINVESALQ

SEQ ID NO: 68853 - protein, 275 aa, Bacillus subtilis
AQTTPWGIEHINAHKAHSSSVTGSGVKVAVLDTGIDASHEDLNVKGGASFISGEPNALVDTNGHGTHVAGTVAALNNTIGVVGVAYNADLYAVKVLSASGSGTLSGIAQGVEWAIANNMDVINMSLGGSSGSTALKQAVDNAYASGIVVVAAAGNSGTRGRQNTMGYPARYSSVIAVGAVDSNNQRASFSSVGAELEVMAPGVSVLSTVPGGGYASYSGTSMASPHVAGAAALIKAKYPSLSASQIRDRLRNTATYLGDPFYYGNGVINVERALQ

SEQ ID NO: 68854 - protein, 275 aa, Bacillus sp. LG1
AQTVPWGIPHIKADKAHAAGVTGSGVKVAILDTGIDANHADLNVKGGASFVSGEPNALQDGNGHGTHVAGTVAALNNTTGVLGVAYNADLYAVKVLSASGSGTLSGIAQGIEWSIENGMNVINMSLGGSSGSTALQQACNNAYNRGIVVIAAAGNSGSSGNRNTMGYPARYSSVIAVGAVSSNNTRASFSSVGSELEVMAPGVNILSTTPGNNYASFNGTSMAAPHVAGAAALIKAKYPSMTNVQIRERLKNTATNLGDPFFYGKGVINVESALQ

SEQ ID NO: 68855 - protein, 275 aa, Bacillus sp. LG1
AQTVPWGIPHIKADKAHAAGVTGSGVKVAILDTGIDANHADLNVKGGASFVSGEPNALQDGNGHGTHVAGTVAALNNTTGVLGVAYNADLYAVKVLSASGSGTLSGIAQGIEWSISNGMNVINMSLGGSSGSTALQQACNNAYNRGAVVIAAAGNSGSSGNRNTMGYPARYSSVIAVGAVSSNNTRASFSSVGSELEVMAPGVNILSTTPGNNYASFNGTSMAAPHVAGAAALIKAKYPSMTNVQIRERLKNTATNLGDPFFYGKGVINVESALQ

SEQ ID NO: 68856 - protein, 275 aa, Bacillus sp. LG1
AQTVPWGIPHIKADKAHAAGVTGSGVKVAILDTGIDANHADLNVKGGASFVSGEPNALQDGNGHGTHVAGTVAALNNTTGVLGVAYNADLYAVKVLSASGSGTLSGIAQGIEWSISNGMNVINMSLGGSSGSTALQQACNNAYNRGIVVIAAAGNSGSSGNRNTMGYPARYSSVIAVGAVSSNNTRASFSSVGSELEVMAPGVNILSTTPGNNYASFNGTSMAAPHVAGAAALIKAKYPSMTNVQIRERLKNTATWLGDPFFYGKGVINVESALQ

SEQ ID NO: 68857 - protein, 275 aa, Bacillus sp. LG1
AQTVPWGIPHIKADKAHAAGVTGSGVKVAILDTGIDANHADLNVKGGASFVSGEPNALQDGNGHGTHVAGTVAALNNTTGVLGVAYNADLYAVKVLSASGSGTLSGIAQGIEWSISNGMNVINMSLGGSSGSTALQQACNNAYNRGIVVIAAAGNSGSSGNRNTMGYPARYSSVIAVGAVSSNNTRASFSSVGSELEVMAPGVNILSTTPGNNYASFNGTSMAAPHVAGAAALIKAKYPSMTNVQIRERLKNTATNLGDPFFYGKGVINVESADQ

SEQ ID NO: 68858 - protein, 275 aa, Bacillus sp. LG1
AQTVPWGIPHIKADKAHAAGVTGSGVKVAILDTGIDANHADLNVKGGASFVSGEPNQLQDGNGHGTHVAGTVAALNNTTGVLGVAYNADLYAVKVLSASGSGTLSGIAQGIEWSISNGMNVINMSLGGSSGSTALQQACNNAYNRGIVVIAAAGNSGSSGNRNTMGYPARYSSVIAVGAVSSNNTRASFSSVGSELEVMAPGVNILSTTPGNNYASFNGTSMAAPHVAGAAALIKAKYPSMTNVQIRERLKNTATNLGDPFFYGKGVINVESALQ

SEQ ID NO: 68859 - protein, 275 aa, Bacillus sp. LG1
AQTVPWGIPHIKADKAHAAGVTGSGVKVAILDTGIDANHADLNVKGGASFVSGEPNALQDGNGHGTHVAGTVAALNNTTGVLGVAYNADLYAVKVLSASGSGTLSGIAQGIEWSISNGMNVINMSLGGSSGSTALQQACNNAYNRGIVVIAAAGNSGSSGNRNTMGYPARYSSVIAVGAVSSNNTRASFSSVGSELEVMAPGVNILSTTPGNNYASFNGTSMAAPHVAGAAALIKAKAPSMTNVQIRERLKNTATNLGDPFFYGKGVINVESALQ

SEQ ID NO: 68860 - protein, 275 aa, Bacillus sp. LG1
AQTVPWGIPHIKADKAHAAGVTGSGVKVAILDTGIDANHADLNVKGGASFVLGEPNALQDGNGHGTHVAGTVAALNNTTGVLGVAYNADLYAVKVLSASGSGTLSGIAQGIEWSISNGMNVINMSLGGSSGSTALQQACNNAYNRGIVVIAAAGNSGSSGNRNTMGYPARYSSVIAVGAVSSNNTRASFSSVGSELEVMAPGVNILSTTPGNNYASFNGTSMAAPHVAGAAALIKAKYPSMTNVQIRERLKNTATNLGDPFFYGKGVINVESALQ

SEQ ID NO: 68861 - protein, 275 aa, Bacillus sp. LG1
AQTVPWGIPHIKADKATAAGVTGSGVKVAILDTGIDANHADLNVKGGASFVSGEPNALQDGNGHGTHVAGTVAALNNTTGVLGVAYNADLYAVKVLSASGSGTLSGIAQGIEWSISNGMNVINMSLGGSSGSTALQQACNNAYNRGIVVIAAAGNSGSSGNRNTMGYPARYSSVIAVGAVSSNNTRASFSSVGSELEVMAPGVNILSTTPGNNYASFNGTSMAAPHVAGAAALIKAKYPSMTNVQIRERLKNTATNLGDPFFYGKGVINVESALQ

SEQ ID NO: 68862 - protein, 275 aa, Bacillus sp. LG1
AQTVPWGIPHIKADKAHAAGVTGVGVKVAILDTGIDANHADLNVKGGASFVSGEPNALQDGNGHGTHVAGTVAALNNTTGVLGVAYNADLYAVKVLSASGSGTLSGIAQGIEWSISNGMNVINMSLGGSSGSTALQQACNNAYNRGIVVIAAAGNSGSSGNRNTMGYPARYSSVIAVGAVSSNNTRASFSSVGSELEVMAPGVNILSTTPGNNYASFNGTSMAAPHVAGAAALIKAKYPSMTNVQIRERLKNTATNLGDPFFYGKGVINVESALQ

SEQ ID NO: 68863 - protein, 275 aa, Bacillus sp. LG1
AQTVPWGIPHIKADKAHAAGVTGSGVKVAALDTGIDANHADLNVKGGASFVSGEPNALQDGNGHGTHVAGTVAALNNTTGVLGVAYNADLYAVKVLSASGSGTLSGIAQGIEWSISNGMNVINMSLGGSSGSTALQQACNNAYNRGIVVIAAAGNSGSSGNRNTMGYPARYSSVIAVGAVSSNNTRASFSSVGSELEVMAPGVNILSTTPGNNYASFNGTSMAAPHVAGAAALIKAKYPSMTNVQIRERLKNTATNLGDPFFYGKGVINVESALQ

SEQ ID NO: 68864 - protein, 275 aa, Bacillus sp. LG1
AQTVPWGIPHIKADKAHAAGVTGSGVKVAILDTGIDANHADLNVKGGASFVSGEPNALQDGNGHGTHVAGTVAALNNTTGVLGVAYNADLYAVKVLSASGSGTLSGIAQGIEWSISNGMNVINMSLGGSSGSTALQQACNNAYNRGIVVIAAAGNSGSSGNRNTMGYPARYSSVIAVGAVSSNNTRASFSSVGSELEVMAPGVNILSTTPGNNYASFNGTSMAAPHVAGAAALIKAKYPSMVNVQIRERLKNTATNLGDPFFYGKGVINVESALQ

SEQ ID NO: 68865 - protein, 275 aa, Bacillus sp. LG1
AQTVPWGIPHIKADKAHAAGVTGSGVKVAILDTGIDANHADLNVKGGASFVSGEPNALQDGNGHGTHVAGTVAALNNTTGVLGVAYNADLYAVKVLSASGSGTLSGIAQGIEWSISNGMNVINMSLGGSSGSTALQQACNNAYNRGIVVIAAAGNSGSSGNRNTMGYPARYISVIAVGAVSSNNTRASFSSVGSELEVMAPGVNILSTTPGNNYASFNGTSMAAPHVAGAAALIKAKYPSMTNVQIRERLKNTATNLGDPFFYGKGVINVESALQ

SEQ ID NO: 68866 - protein, 275 aa, Bacillus subtilis
AQTTPWGITHINAHKAHSSSVTGSGVKVAVLDTGIDASHPDLNVKGGASFISGEPNALVDTNGHGTHVAGTVAALNNNIGVVGVAYNADLYAVKVLSASGSGTLSGIAQGVEWAIANNMDVINMSLGGSSGSTALKQAVDNAYASGIVVVAAAGNSGTRGRQNTMQYPARYSSVIAVGAVDSNNQRASFSSVGAELEVMAPGVSVLSTVPGGGYASYNGTSMASPHVAGAAALIKAKYPSLSASQIRDRLRNTATYLGDPFYYGNGVINVERALQ

SEQ ID NO: 68867 - protein, 275 aa, Bacillus sp. LG1
AQTVPWGIPHIKADKAHAAGVTGSGVKVAILDTGIDANHADLNVKGGASFVSGEPNALQDGNGHGTHVAGTVAALNNTTGVLGVAYNADLYAVKVLSASGSGTLSGIAQGIEWSISNGMNVINMSLGGSSGSTALQQACNNAYNRGIVVIAAAGNSGSSGNRNTMGYPARYSSVIAVGAVSSNNTRASFSSVGSELEVMAPGVNILSTTPGNNYASFNGTSMAAPHVAGAAALIKAKYPSMTNVQIRERLKNTATNLGDPFFYGKGTINVESALQ

SEQ ID NO: 68868 - protein, 275 aa, Bacillus sp. LG1
AQTVPWGIPHIKADKAHAAGVTGSGVKVAILDTGIDANHADLNVKGGASFVSGEPNALQDGNGHGTHVAGTVAALNNTTGVLGVAYNADLYAVKVLSASGSGTLSGIAQGIEWSISNGMNVINMSLGGSSGSTALQQACNNAYNRGIVVIAAAGNSGSSGNRNTMGYPARYSSVIAVGAVSSNNTRASFSSVGSELEVMAPGVLILSTTPGNNYASFNGTSMAAPHVAGAAALIKAKYPSMTNVQIRERLKNTATNLGDPFFYGKGVINVESALQ

SEQ ID NO: 68869 - protein, 275 aa, Bacillus sp. LG1
AQTVPWGIPHIKADKAHAAGVTGSGVKVAILDTGIDANHADLNVKGGASFVSGEPNALQDGNGHGTHVAGTVAALNNTTGVLGVAYNADLYAVKVLSASGSGTLSGIAQGIEWSISNGMNVINMSLGGSSGSTALQQACNNAYNRGIVVIAAAGNSGSSGNRNTMGYPARYSSVIAVGAVSSNNTRASFSSVGSELEVMAPGVNILSTTPGNNYASFNGTSMAAPHVAGAAALIKAKYPSMPNVQIRERLKNTATNLGDPFFYGKGVINVESALQ

SEQ ID NO: 68870 - protein, 275 aa, Bacillus sp. LG1
AQTVPWGIPHIKADKAHAAGVTGSGVKVAILDTGIDANHADLNVKGGASFVSGEPNALQDGNGHGTHVAGTVAALNNTTGVLGVAYNADLYAVKVLSASGSGTLSGIAQGIEWSISNGMNVINMSLGGSSGSTALQQACNNAYNRGMVVIAAAGNSGSSGNRNTMGYPARYSSVIAVGAVSSNNTRASFSSVGSELEVMAPGVNILSTTPGNNYASFNGTSMAAPHVAGAAALIKAKYPSMTNVQIRERLKNTATNLGDPFFYGKGVINVESALQ

SEQ ID NO: 68871 - protein, 275 aa, Bacillus sp. LG1
AQTVPWGIPHIKADKAHAAGVTGSGVKVAILDTGIDANHADLNVKGGASFVSGEPNALQDGNGHGTHVAGTVAALNNTTGVLGVAYNADLYAVKVLSASGSGTLSGIAQGIEWSISNGMNVINMSLGGSSGSTALQQACNNAYNRGIVVIAAAGNSGSSGNRNTMGYPARYSSVIAVGAVSSNNTRASFSSVGSELEVMAPGVNILSTTPGNNYASFNGTSMAAPHVAGAAALIKGKYPSMTNVQIRERLKNTATNLGDPFFYGKGVINVESALQ

SEQ ID NO: 68872 - protein, 275 aa, Bacillus sp. LG1
AQTVPWGIPHIKADKAHAAGVTGSGVKVAILDTGIDANHADLNVKGGASFVSGEPNALQDGNGHGTHVAGTVAALNNTTGVLGVAYNADLYAVKVLSASGSGTLSGIAQGIEWSISNGMNVINMSLGGSSGSTALQQACNNAYNRGIVVIAAAGNSGSSGNRNTMGYPARYSSVIAVGAVSSNNHRASFSSVGSELEVMAPGVNILSTTPGNNYASFNGTSMAAPHVAGAAALIKAKYPSMTNVQIRERLKNTATNLGDPFFYGKGVINVESALQ

SEQ ID NO: 68873 - protein, 275 aa, Bacillus sp. LG1
AQTVPWGIPHIKADKAHAAGVTGSGVKVAILDTGIAANHADLNVKGGASFVSGEPNALQDGNGHGTHVAGTVAALNNTTGVLGVAYNADLYAVKVLSASGSGTLSGIAQGIEWSISNGMNVINMSLGGSSGSTALQQACNNAYNRGIVVIAAAGNSGSSGNRNTMGYPARYSSVIAVGAVSSNNTRASFSSVGSELEVMAPGVNILSTTPGNNYASFNGTSMAAPHVAGAAALIKAKYPSMTNVQIRERLKNTATNLGDPFFYGKGVINVESALQ

SEQ ID NO: 68874 - protein, 275 aa, Bacillus subtilis
AQVTPWGITHINAHKAHSSSVTGSGVKVAVLDTGIDASHPDLNVKGGASFISGEPNALVDTNGHGTHVAGTVAALNNTIGVVGVAYNADLYAVKVLSASGSGTLSGIAQGVEWAIANNMDVINMSLGGSSGSTALKQAVDNAYASGIVVVAAAGNSGTRGRQNTMGYPARYSSVIAVGAVDSNNQRASFSSVGAELEVMAPGVSVLSTVPGGGYASYSGTSMASPHVAGAAALIKAKYPSLSASQIRDRLRNTATYLGPPFYYGNGVINVERALQ

SEQ ID NO: 68875 - protein, 275 aa, Bacillus sp. LG1
AQTVPWGIPHIKADKAHAAGVTGSGVKVAILDTGIDANHADLNVKGGASFVSGEPNALQDGNGHGTHVAGTVAALNNTTGVLGVAYNADLYAVKVLSASGSGTLSGIIQGIEWSISNGMNVINMSLGGSSGSTALQQACNNAYNRGIVVIAAAGNSGSSGNRNTMGYPARYSSVIAVGAVSSNNTRASFSSVGSELEVMAPGVNILSTTPGNNYASFNGTSMAAPHVAGAAALIKAKYPSMTNVQIRERLKNTATNLGDPFFYGKGVINVESALQ

SEQ ID NO: 68876 - protein, 275 aa, Bacillus sp. LG1
AQTVPWGIPHIKADKAHAAGVTGSGVKVAILDTGIDANHADLNVKGGASFVSGEPNALQDGNGHGTHVAGTVAALNNTTGVLGVAYNADLYAVKVLSASGSGTLSGIAQGIEWSISNGMNVINMSLGGSSGSTALQQACNNAYNRGIVVIAAAGNSGSSGNRNTVGYPARYSSVIAVGAVSSNNTRASFSSVGSELEVMAPGVNILSTTPGNNYASFNGTSMAAPHVAGAAALIKAKYPSMTNVQIRERLKNTATNLGDPFFYGKGVINVESALQ

SEQ ID NO: 68877 - protein, 275 aa, Bacillus sp. LG1
AQTVPWGIPHIKADKAHAAGVTGSGVKVAILDTGIEANHADLNVKGGASFVSGEPNALQDGNGHGTHVAGTVAALNNTTGVLGVAYNADLYAVKVLSASGSGTLSGIAQGIEWSISNGMNVINMSLGGSSGSTALQQACNNAYNRGIVVIAAAGNSGSSGNRNTMGYPARYSSVIAVGAVSSNNTRASFSSVGSELEVMAPGVNILSTTPGNNYASFNGTSMAAPHVAGAAALIKAKYPSMTNVQIRERLKNTATNLGDPFFYGKGVINVESALQ

SEQ ID NO: 68878 - protein, 275 aa, Bacillus sp. LG1
AQTVPWGIPHIKADKAHAAGVTGSGVKVAILDTGIDANHADLNVKGGASFVSGEPNALQDGNGHGTHVAGTVAALNNTTGVLGVAYNADLYAVKVLSASGSGTLSGIAQGIEWSISNGMNVINMSLGGSSGSTALQQACNNAYNRGIVVIAAAGNSGSSGNRNTMGYPARYSSVIAVGAVSSNNTRASFSSVGSELEVMAPGVNILSTTPGNKYASFNGTSMAAPHVAGAAALIKAKYPSMTNVQIRERLKNTATNLGDPFFYGKGVINVESALQ

SEQ ID NO: 68879 - protein, 275 aa, Bacillus sp. LG1
AQTVPWGIPHIKADKAHAAGVTGSGVKVAILDTGIDANHADLNVKGGASFVSGEPNALQDGNGHGTHVAGTVAALNNTTGVLGVAYNADLYAVKVLSASGSGTLSGIAQGIEWSISNGMNVINMSLGGSSGSTALQQACNNAYNRGIVVIAAAGNSGSSGNRNTMGYPARYSSVIAVGAVSSNNTRASFSSVGSELEVMAPGVNILSTTPGNNYAIFNGTSMAAPHVAGAAALIKAKYPSMTNVQIRERLKNTATNLGDPFFYGKGVINVESALQ

SEQ ID NO: 68880 - protein, 275 aa, Bacillus sp. LG1
AQTVPWGIPHIKADKAHAAGVTGSGVKVAILDTGIDANHADLNVKGGASFVSGEPNALQDGNGHGTHVAGTVAALNNTTGVLGVAYNADLYAVKVLSASGSGTLSGIAQGIEWSISNGMNVINMSLGGSSGSTALQQACNNAYNRGIVVIAAAGNSGSSGNRNTMGYPARYSSVIAVGAVSSNNTRASFSSVGSELEVMAPGVNILSTTPGNNYASFNGTSMAAPHVAGAAALIKAKYPSMTNVQIRERLKNTATNLGDPFFYGKGVINVENALQ

SEQ ID NO: 68881 - protein, 275 aa, Bacillus sp. LG1
AQTVPWGIPHIKADKKHAAGVTGSGVKVAILDTGIDANHADLNVKGGASFVSGEPNALQDGNGHGTHVAGTVAALNNTTGVLGVAYNADLYAVKVLSASGSGTLSGIAQGIEWSISNGMNVINMSLGGSSGSTALQQACNNAYNRGIVVIAAAGNSGSSGNRNTMGYPARYSSVIAVGAVSSNNTRASFSSVGSELEVMAPGVNILSTTPGNNYASFNGTSMAAPHVAGAAALIKAKYPSMTNVQIRERLKNTATNLGDPFFYGKGVINVESALQ

SEQ ID NO: 68882 - protein, 275 aa, Bacillus sp. LG1
AQTVPWGIPHIKADKAHAAGVTGSGVKVAILDTGIDANHADLNVKGGASFVSGEPNALQDGNGHGTHVAGTVAALNNTTGVLGVAYNADLYAVKVLSASGSGTLSGIAQGIEWSISNGMNVINMSLGGSSGSTALQQACNNAYNRGIVVIAAAGNSGSSGNRNTMGYPARYHSVIAVGAVSSNNTRASFSSVGSELEVMAPGVNILSTTPGNNYASFNGTSMAAPHVAGAAALIKAKYPSMTNVQIRERLKNTATNLGDPFFYGKGVINVESALQ

SEQ ID NO: 68883 - protein, 275 aa, Bacillus sp. LG1
AQTVPWGIPHIKADKAHAAGVTGSGVKVAILDTGIDANHADLNVKGGASFVSGEPEALQDGNGHGTHVAGTVAALNNTTGVLGVAYNADLYAVKVLSASGSGTLSGIAQGIEWSISNGMNVINMSLGGSSGSTALQQACNNAYNRGIVVIAAAGNSGSSGNRNTMGYPARYSSVIAVGAVSSNNTRASFSSVGSELEVMAPGVNILSTTPGNNYASFNGTSMAAPHVAGAAALIKAKYPSMTNVQIRERLKNTATNLGDPFFYGKGVINVESALQ

SEQ ID NO: 68884 - protein, 275 aa, Bacillus sp. LG1
AQTVPWGIPHIKADKAHAAGVTGSGVKVAILDTGIDANHADLNVKGGASFVSGEPNALQDGNGHGTHVAGTVAALNNTTGVLGVAYNADLYAVKVLSASGSGTLSGIAQGIEWSISNGMNVINMSLGGSSGSTALQQACNNAYNRGIVVIAAAGNSGSSGNRNTMGYPARYSSVIAVGAVSSNNTRASFSSVGSELEVMAPGVNILSTTPGNNYASFNGTSMAAPHVAGAAALIKAKYPSMTNVQIRERLKNTATNLGDPFFYGKGAINVESALQ

SEQ ID NO: 68885 - protein, 275 aa, Bacillus sp. LG1
AQTVPWGIPHIKADKAHAAGVTGSGVKVAILDTGIDANHADLNVKGGASFVSGEPNALQDGNGHGTHVAGTVAALNNTTGVLGVAYNADLYAVKVLSASGSGTLSGIAQGIEWSISNGMNVINMSLGGSSGSTALQQACNNAYNRGIVVIAAAGNSGSSGNRNTMGYPARYSSVIAVGAVSSNNTRASFSSVGSELEVMAPGDNILSTTPGNNYASFNGTSMAAPHVAGAAALIKAKYPSMTNVQIRERLKNTATNLGDPFFYGKGVINVESALQ

SEQ ID NO: 68886 - protein, 275 aa, Bacillus subtilis
AQVTPWGITHINAHKAHSSSVTGSGVKVAVLDTGIDASHPDLNVKGGASFISGEPNALVDTNGHGTHVSGTVAALNNTIGVVGVAYNADLYAVKVLSASGSGTLSGIAQGVEWAIANNMDVINMSLGGSSGSTALKQAVDNAYASGIVVVAAAGNSGTRGRQNTMGYPARYSSVIAVGAVDSNNNRASFSSVGAELEVMAPGVSVLSTVPGGGYASYSGTSMASPHVAGAAALIKAKYPSLSASQIRDRLRNTATYLGDPFYYGNGVINVERALQ

SEQ ID NO: 68887 - protein, 275 aa, Bacillus sp. LG1
AQTVPWGIPHIKADKAHAAGVTGSGVKVAILDTGIDANHADLNVKGGASFVSGEPNALQDGNGHGTHVAGTVAALNNTTGVLGVAYNARLYAVKVLSASGSGTLSGIAQGIEWSISNGMNVINMSLGGSSGSTALQQACNNAYNRGIVVIAAAGNSGSSGNRNTMGYPARYSSVIAVGAVSSNNTRASFSSVGSELEVMAPGVNILSTTPGNNYASFNGTSMAAPHVAGAAALIKAKYPSMTNVQIRERLKNTATNLGDPFFYGKGVINVESALQ

SEQ ID NO: 68888 - protein, 275 aa, Bacillus sp. LG1
AQTVPWGIPHIKADKAHAAGVTGSGVKVAILDTGIDANHADLNVKGGASFVSGEPNALQDGNGHGTHVAGTVAALNNTTGVLGVAYHADLYAVKVLSASGSGTLSGIAQGIEWSISNGMNVINMSLGGSSGSTALQQACNNAYNRGIVVIAAAGNSGSSGNRNTMGYPARYSSVIAVGAVSSNNTRASFSSVGSELEVMAPGVNILSTTPGNNYASFNGTSMAAPHVAGAAALIKAKYPSMTNVQIRERLKNTATNLGDPFFYGKGVINVESALQ

SEQ ID NO: 68889 - protein, 275 aa, Bacillus sp. LG1
AQTVPWGIPHIKADKAHAAGVTGSGVKVAILDTGIDANHADLNVKGGASFVSGEPNALQDGNGHGTHVAGTVAALNNTTGVLGVAYNADLYAVKVLSASGSGTLSGIAQGIEWSISNGMNVINMSLGGSSGSTALQQACNNAYNRGIVVIAAAGNSGSSGNRNTMGYPARYSSVIAVGAVSSNNTRASFSSVGSELEVMAPGVNILSTTPGNNYASFNGTSMAAPHVAGAAALIKAKLPSMTNVQIRERLKNTATNLGDPFFYGKGVINVESALQ

SEQ ID NO: 68890 - protein, 275 aa, Bacillus sp.
AQTVPWGIPHIKADKAHAAGVTGSGVKVAILDTGIDANHADLNVKGGASFVTGEPNALQDGNGHGTHVAGTVAALNNTTGVLGVAYNADLYAVKVLSASGSGTLSGIAQGIEWSISNGMNVINMSLGGFSGSTALQQACNNAYNRGIVVIAAAGNSGSSGNRNTMGYPARYSSVIAVGAVSSNNTRASFSSVGSELEVMAPGVNILSTTPGNNYASFNGTSMAAPHVAGAAALIKAKYPSMTNVQIRERLKNTATNLGDPFFYGKGVINVESALQ

SEQ ID NO: 68891 - protein, 275 aa, Bacillus sp. LG1
AQTVPWGIPHIKADKAHAAGVTGSGVKVAILDTGIDANHADLNVKGGASFVSGEPNALQDGNGHGTHVAGTVAALNNTTGVLGVAYNADLYAVKVLSASGSGTLSGIAQGIEWSISNGMNVINMSLGGSSGSTALNQACNNAYNRGIVVIAAAGNSGSSGNRNTMGYPARYSSVIAVGAVSSNNTRASFSSVGSELEVMAPGVNILSTTPGNNYASFNGTSMAAPHVAGAAALIKAKYPSMTNVQIRERLKNTATNLGDPFFYGKGVINVESALQ

SEQ ID NO: 68892 - protein, 275 aa, Bacillus sp. LG1
AQTVPWGIPHIKADKAHAAGVTGSGVKVAILDTGIDANHADLNVKGGASFVSGEPNALQDGNGHGTHVAGTVAALNNTTGVLGVAYNADLYAVKVLSASGSGTLSGIAQGIEWSISNGMNVINMSLGGSSGSTALQQACTNAYNRGIVVIAAAGNSGSSGNRNTMGYPARYSSVIAVGAVSSNNTRASFSSVGSELEVMAPGVNILSTTPGNNYASFNGTSMAAPHVAGAAALIKAKYPSMTNVQIRERLKNTATNLGDPFFYGKGVINVESALQ

SEQ ID NO: 68893 - protein, 275 aa, Bacillus sp. LG1
AQTVPQGIPHIKADKAHAAGVTGSGVKVAILDTGIDANHADLNVKGGASFVSGEPNALQDGNGHGTHVAGTVAALNNTTGVLGVAYNADLYAVKVLSASGSGTLSGIAQGIEWSISNGMNVINMSLGGSSGSTALQQACNNAYNRGIVVIAAAGNSGSSGNRNTMGYPARYSSVIAVGAVSSNNTRASFSSVGSELEVMAPGVNILSTTPGNNYASFNGTSMAAPHVAGAAALIKAKYPSMTNVQIRERLKNTATNLGDPFFYGKGVINVESALQ

SEQ ID NO: 68894 - protein, 275 aa, Bacillus sp. LG1
AQTVPWGIPHIKADKAHAAGVTGSGVKVAILDTGIDANHADLNVKGGASFVSGEPNALQDGNGHGTHVAGTVAALNNTTGVLGVAYNADLYAVKVLSASGSGTLSGIAQGIEWSISNGMNVINMSLGGSSGSTALQQACNNAYNRGIVVIAAAGNSGSSGNRNTMGYPARYSSVIAVGAVSSNNTRASFSSVGSELEVMAPGVNILSTTPGNNYASFNGTSMAAPHVAGAAALIKAKYPSMTNVQIRERLKNTATNLGDPFFYGKGVINVESAMQ

SEQ ID NO: 68895 - protein, 275 aa, Bacillus sp. LG1
AQTVPWGIPHIKADKAHAAGVTGSGVKVAILDTGIDANHADLNVKGGASFVSGEPNALQDGNGHGTHVAGTVAALNNTTGVLGVAINADLYAVKVLSASGSGTLSGIAQGIEWSISNGMNVINMSLGGSSGSTALQQACNNAYNRGIVVIAAAGNSGSSGNRNTMGYPARYSSVIAVGAVSSNNTRASFSSVGSELEVMAPGVNILSTTPGNNYASFNGTSMAAPHVAGAAALIKAKYPSMTNVQIRERLKNTATNLGDPFFYGKGVINVESALQ

SEQ ID NO: 68896 - protein, 275 aa, Bacillus sp. LG1
AQTVPWGIPHIKADKAHAAGVTGSGVKVAILDTGIDANHKDLNVKGGASFVSGEPNALQDGNGHGTHVAGTVAALNNTTGVLGVAYNADLYAVKVLSASGSGTLSGIAQGIEWSISNGMNVINMSLGGSSGSTALQQACNNAYNRGIVVIAAAGNSGSSGNRNTMGYPARYSSVIAVGAVSSNNTRASFSSVGSELEVMAPGVNILSTTPGNNYASFNGTSMAAPHVAGAAALIKAKYPSMTNVQIRERLKNTATNLGDPFFYGKGVINVESALQ

SEQ ID NO: 68897 - protein, 275 aa, Bacillus sp. LG1
AQTVPWGIPHIKADKAHAAGVTGSGVKVAILDTGIDANHADLNVKGGASFVSGEPNALQDGNGHGTHVAGTVAALNNTTGVLGVAYNADLYAVKVLSASGSGTLSGIAQGIEWSISNGMNVINMSLGGSSGSTALQQACNNAYNRGIVVIAAAGNSGSSGNRNTMGYPARYTSVIAVGAVSSNNTRASFSSVGSELEVMAPGVNILSTTPGNNYASFNGTSMAAPHVAGAAALIKAKYPSMTNVQIRERLKNTATNLGDPFFYGKGVINVESALQ

SEQ ID NO: 68898 - protein, 275 aa, Bacillus sp. LG1
AQTVPWGIPHIKADKAHAAGVTGSGVKVAILDTGIDANHADLNVKGGASFVSGEPNALQDGNGHGTHVAGTVAALNNTTGVLGVAYNADLYAVKVLSASGSGTLSGIAQGIEWSISNGMNVINMSLGGSSGSTALQQACNNAYNRGIVVIAAAGNSGSSGNRNTMGYPARYSSVIAVGAVSSNNTRASFSSVGSELEVMAPGVNILSTTPGNNYASFNGTSMAAPHVAGAAALIKAKEPSMTNVQIRERLKNTATNLGDPFFYGKGVINVESALQ

SEQ ID NO: 68899 - protein, 275 aa, Bacillus sp. LG1
AQTVPWGIPHIKADKAHAAGVTGSGVKVAILDTGIDANHADLNVKGGASFVSGEPNALQDGNGHGTHVAGTVAALNNTTGVLGVAYNADLYAVKVLSASGSGTLSGIAQGIEWSISNGMNVINMSLGGSSGSTALQQACNNAYNRGIVVIAAAGNSGSSGNRNTMGYPARYSSVIAVGAVSSNNTRASFSSVGSELEVMAPGVNILSTTPGNNYASFNGTSMAAPHVAGAAALIKAKYPSMTPVQIRERLKNTATNLGDPFFYGKGVINVESALQ

SEQ ID NO: 68900 - protein, 275 aa, Bacillus sp. LG1
AQTVPWGIPHIKADKAHAAGVTGSGVKVAILDTGIDANHADLNVKGGASFVSGEPMALQDGNGHGTHVAGTVAALNNTTGVLGVAYNADLYAVKVLSASGSGTLSGIAQGIEWSISNGMNVINMSLGGSSGSTALQQACNNAYNRGIVVIAAAGNSGSSGNRNTMGYPARYSSVIAVGAVSSNNTRASFSSVGSELEVMAPGVNILSTTPGNNYASFNGTSMAAPHVAGAAALIKAKYPSMTNVQIRERLKNTATNLGDPFFYGKGVINVESALQ

SEQ ID NO: 68901 - protein, 275 aa, Bacillus sp. LG1
AQTVPWGIPHIKADKAHAAGVTGSGVKVAILDTGIDANHADLNVKGGASFVSGENNALQDGNGHGTHVAGTVAALNNTTGVLGVAYNADLYAVKVLSASGSGTLSGIAQGIEWSISNGMNVINMSLGGSSGSTALQQACNNAYNRGIVVIAAAGNSGSSGNRNTMGYPARYSSVIAVGAVSSNNTRASFSSVGSELEVMAPGVNILSTTPGNNYASFNGTSMAAPHVAGAAALIKAKYPSMTNVQIRERLKNTATNLGDPFFYGKGVINVESALQ

SEQ ID NO: 68902 - protein, 275 aa, Bacillus sp. LG1
AQTVPWGIPHIKADKAHAAGVTGSGVKVAILDTGIDANHADLNVKGGASFVSGEPNALQDGNGHGTHVAGTVAALNNTTGVLGVAYNADLYAVKVLSASGSGTLSGIAQGIEWSISNGMNVINMSLGGSSGSTALQQACNNAYNRGIVVIAAAGNSGSSGNRNTMGYPARYSSVIAVGAVSSNNTRASFSSVGSELEVMAPGVNILSTTPGNNYASFNGTSMAAPHVAGAAALIKAKYPSMTNVQIRKRLKNTATNLGDPFFYGKGVINVESALQ

SEQ ID NO: 68903 - protein, 275 aa, Bacillus sp. LG1
AQTVPWGIPHIKADKAHAAGVTGSGVKVAILDTGIDANHADLNVKGGASFVGGEPNALQDGNGHGTHVAGTVAALNNTTGVLGVAYNADLYAVKVLSASGSGTLSGIAQGIEWSISNGMNVINMSLGGSSGSTALQQACNNAYNRGIVVIAAAGNSGSSGNRNTMGYPARYSSVIAVGAVSSNNTRASFSSVGSELEVMAPGVNILSTTPGNNYASFNGTSMAAPHVAGAAALIKAKYPSMTNVQIRERLKNTATNLGDPFFYGKGVINVESALQ

SEQ ID NO: 68904 - protein, 275 aa, Bacillus sp. LG1
AQTVPWGIPHIKADKAHAAGVTGSGVKVAILDTGIDANHADLNVKGGASFVSGEPNALQDGNGHGTHVAGTVAALNNTTGVLGVAYNADLYAVKVLSASGSGTLSGIAQGIEWSISNGMNVINMSLGGSSGSTALQQACNNAYNRGIVVIAAAGNSGSSGNRNTMGYPARYSSVIAVGAVSSNNTRASFSSVGSELEVMAPGTNILSTTPGNNYASFNGTSMAAPHVAGAAALIKAKYPSMTNVQIRERLKNTATNLGDPFFYGKGVINVESALQ

SEQ ID NO: 68905 - protein, 275 aa, Bacillus sp. LG1
AQTVPWGIPHIKADKAHAAGVTGSGVKVAILDTGIDANHADLNVKGGASFVSGEPNALQDGNGHGTHVAGTVAALNNTTGVLGVAYNADLYAVKVLSASGSGTLSGIAQGIEWSISNGMNVINMSLGGSSGSTALQQACNNAYNRGIVVTAAAGNSGSSGNRNTMGYPARYSSVIAVGAVSSNNTRASFSSVGSELEVMAPGVNILSTTPGNNYASFNGTSMAAPHVAGAAALIKAKYPSMTNVQIRERLKNTATNLGDPFFYGKGVINVESALQ

SEQ ID NO: 68906 - protein, 275 aa, Bacillus sp. LG1
AQTVPWGIPHIKADKAHAAGVTGSGVKVAILDTGIDANHADLNVKGGASFVSGEPNALQDGNGHGTHVAGTVAALNNTTGVLGVAYNADLYAVKVLSASGSGTLSGIAQGIEWSISNGMNVINMSLGGSSGSTALQQACNNAYNRGIVVNAAAGNSGSSGNRNTMGYPARYSSVIAVGAVSSNNTRASFSSVGSELEVMAPGVNILSTTPGNNYASFNGTSMAAPHVAGAAALIKAKYPSMTNVQIRERLKNTATNLGDPFFYGKGVINVESALQ

SEQ ID NO: 68907 - protein, 275 aa, Bacillus sp. LG1
AQTVPWGIPHIKADKAHAAGVTGSGVKVAILDTGIDANHADLNVKGGASFVSGEPNALQDGNGHGTHVAGTVAALNNTTGVLGVAYNADLYAVKVLSASGSGTLSGIAQGIEWSISNGMNVINMSLGGSSGSTALQQACNNAYNRGIVVIAAAGNSGSSGNRNTMGYPARYSSVIAVGAVSSNNTRASFSSVGSELEVMAPGVNILSTTPGNNYASFNGTSMAAPHVAGAAALIKAKYPSMTNVQIRERLKNTATNLGDMFFYGKGVINVESALQ

SEQ ID NO: 68908 - protein, 275 aa, Bacillus sp. LG1
AQTVPWGIPHIKADKAHAAGVTGSGVKVAILDTGIDANHADLNVKGGASFVSGEPNAVQDGNGHGTHVAGTVAALNNTTGVLGVAYNADLYAVKVLSASGSGTLSGIAQGIEWSISNGMNVINMSLGGSSGSTALQQACNNAYNRGIVVIAAAGNSGSSGNRNTMGYPARYSSVIAVGAVSSNNTRASFSSVGSELEVMAPGVNILSTTPGNNYASFNGTSMAAPHVAGAAALIKAKYPSMTNVQIRERLKNTATNLGDPFFYGKGVINVESALQ

SEQ ID NO: 68909 - protein, 275 aa, Bacillus sp. LG1
AQTVPWGIPHIKADKAHAAGVTGSGVKVAILDTGIDANHADLNVKGGASFVSGEPNALQDGNGHGTHVAGTVAALNNTTGVLGVAYNADLYAVKVLSASGSGTLSGIAQGIEWSISNGMNVINMSLGGSSGSTALQQACNNAYNRGIVVIAAAGNSGSSGNRNTMGYPARYSSVIAVGAVSSNNTRASFSSVGSELEVMAPGVNILSTTPGNNYASFNGTSMAAPHVAGAAALIKAKYPSMTLVQIRERLKNTATNLGDPFFYGKGVINVESALQ

SEQ ID NO: 68910 - protein, 275 aa, Bacillus sp. LG1
AQTVPWGIPHIKADKAHAAGVTGSGVKVAILDTGIDANHADLNVKGGASFVSGEPNALQDGNGHGTHVAGTVAALNNTTGVLGVAYNADLYAVKVLSASGSGTLSGIAQGIEWSISNGMNVINMSLGGSSGSTALQQACNNAYNRGIVVIAAAGNSGSSGNRNTMGYPARYSSVIAVGAVSSNNTRASFSSVGMELEVMAPGVNILSTTPGNNYASFNGTSMAAPHVAGAAALIKAKYPSMTNVQIRERLKNTATNLGDPFFYGKGVINVESALQ

SEQ ID NO: 68911 - protein, 275 aa, Bacillus sp. LG1
AQTVPWGIPHIKADKAHAAGVTGSGVKVAILDTGIDANHADLNVKGGASFVSGEPNALQDGNGHGTHVAGTVAALNNTTGVLGVAYNADLYAVKVLSASGSGTLSGIAQGIEWSISNGMNVINMSLGGSSGSTALQQACNNAYNRGIVVIAAAGNSGSSGNRNTMGYPARYSSVIAVGAVSSNNTRASFSSVGSELEVMAPGVNILSTTPGNNYASFNGTSMAAPHVAGAAALIKAKYPSMTNVQIRERLKNTATDLGDPFFYGKGVINVESALQ

SEQ ID NO: 68912 - protein, 275 aa, Bacillus sp. LG1
AQTVPWGIPHIKADKAHAAGVTGSGVKVAILDTGIDANHADLNVKGGASFVSGEPNALQDGNGHGTHVAGTVAALNNTTGVLGVAYNADLYAVKVLSASGSGTLSGIAQGIEWSISNGMNVINMSLGGSSGSTALQQACNNAYNRGIVVIAAAGNSGSSGNRNTMGYPARYVSVIAVGAVSSNNTRASFSSVGSELEVMAPGVNILSTTPGNNYASFNGTSMAAPHVAGAAALIKAKYPSMTNVQIRERLKNTATNLGDPFFYGKGVINVESALQ

SEQ ID NO: 68913 - protein, 275 aa, Bacillus amyloliquefaciens
AQSVPYGVSQIKAPALHSQGYTGSNVKVAVIDSGIDSSHPDLKVAGGASMVPSETNPFQDNNSHGTHVAGTVAALNNSIGVLGVAPSASLYAVKVLNSSGSGQYSWIINGIEWAIANNMDVINMSLGGPSGSAALKAAVDKAVASGVVVVAAAGNEGTSGSSSTVGYPGKYPSVIAVGAVDSSNQRASFSSVGPELDVMAPGVSIQSTLPGNKYGALNGTSMASPHVAGAAALILSKHPNWTNTQVRSSLENTTTKLGDSFYYGKGLINVQAAAQ

SEQ ID NO: 68914 - protein, 275 aa, Bacillus sp. LG1
AQTVPWGIPHIKADKAHAAGVTGSGVKVAILDTGIDANHADLNVKGGASFVSGEPNALQDGNGHGTHVAGTVAALNNTTGVLGVAYNADLYAVKVLGASGSGTLSGIAQGIEWSISNGMNVINMSLGGSSGSTALQQACNNAYNRGIVVIAAAGNSGSSGNRNTMGYPARYSSVIAVGAVSSNNTRASFSSVGSELEVMAPGVNILSTTPGNNYASFNGTSMAAPHVAGAAALIKAKYPSMTNVQIRERLKNTATNLGDPFFYGKGVINVESALQ

SEQ ID NO: 68915 - protein, 275 aa, Bacillus sp. LG1
AQTVPWGIPHIKADKAHAAGVTGSGVKVAILDTGIDANHADLNVKGGASFVSGEPNALQDGNGHGTHVAGTVAALNNTTGVLGVAYNADLYAVKVLSASGSGTLSGIAQGIEWSISNGMNVINMSLGGSSGSTALQQACNNAYNRGIVVIAAAGNSGSSGNRNTMGYPARYSSVIAVGAVSSNNTRASFSSVGSELEVMAPGVNILSTTPGNNYASFNGTSMAAPHVAGAAALIKAKYPSMTDVQIRERLKNTATNLGDPFFYGKGVINVESALQ

SEQ ID NO: 68916 - protein, 275 aa, Bacillus sp.
AQTVPWGIPHIKADKAHAAGVTGSGVKVAILDTGIDANHADLNVKGGASFVSGEPNALQDGNGHGTHVAGTVAALDNTTGVLGVAYNADLYAVKVLSASGSGTLSGIAQGIEWSISNGMNVINMSLGGSSGSTALQQACNNAYNRGIVVIAAAGNSGSSGNRNTMDYPARYSSVIAVGAVSSNNTRASFSSVGSELEVMAPGVNILSTTPGNNYASFNGTSMAAPHVAGAAALIKAKYPSMTNVQIRERLKNTATNLGDPFFYGKGVINVESALQ

SEQ ID NO: 68917 - protein, 275 aa, Bacillus sp. LG1
AQTVPWGIPHIKADKAHAAGVTGSGVKVAILDTGIDANHADLNVKGGASFVSGEPNALQDGNGHGTHVAGTVAALNNTTGVLGVAYNADLYAVKVLSASGSGTLSGIAQGIEWSISNGMNVINMSLGGSSGSTALQQACNNAYNRGIVVIAAAGNSGSSGNRNTMGYPARYNSVIAVGAVSSNNTRASFSSVGSELEVMAPGVNILSTTPGNNYASFNGTSMAAPHVAGAAALIKAKYPSMTNVQIRERLKNTATNLGDPFFYGKGVINVESALQ

SEQ ID NO: 68918 - protein, 275 aa, Bacillus sp. LG1
AQTVPWGIPHIKADKAHAAGVTGSGVKVAILDTGIDANHADLNVKGGASFVSGEPNALQDGNGHGTHVAGTVAALNNTTGVLGVAYNADLYAVKVLSASGSGTLSGIAQGIEWSISNGMTVINMSLGGSSGSTALQQACNNAYNRGIVVIAAAGNSGSSGNRNTMGYPARYSSVIAVGAVSSNNTRASFSSVGSELEVMAPGVNILSTTPGNNYASFNGTSMAAPHVAGAAALIKAKYPSMTNVQIRERLKNTATNLGDPFFYGKGVINVESALQ

SEQ ID NO: 68919 - protein, 275 aa, Bacillus subtilis
AQVTPWGITHINAHKAHSSSVTGSGVKVAVLDTGIDASHPDLNVKGGASFISGEPNALVDTNGHGTHVSGTVAALNNTIGVVGVAYNADLYAVKVLSASGSGTLSGIAQGVEWAIANNMDVINMSLGGSSGSTALKQAVDNAYASGIVVVAAAGNSGTRGRQNTMQYPARYSSVIAVGAVDSNNNRASFSSVGAELEVMAPGVSVLSTVPGGGYASYNGTSMASPHVAGAAALIKAKYPSLSASQIRDRLRNTATYLGDPFYYGNGVINVERALQ

SEQ ID NO: 68920 - protein, 275 aa, Bacillus sp. LG1
AQTVPWGIPHIKADKAHAAGVTGSGVKVAILDTGIDANHADLNVKGGASFVSGEPNALQDGNGHGTHVAGTVAALNNTTGVLGVAYNADLYAVKVLSASGSGTLSGIAQGIEWSISNGMNVINMSLGGSSGSTALQQACNNAYNRGIVVIAAAGNSGSSGNRNTMGYPARYSSVIAVGAVSSNNTRASFSSVGSELEVMAPGVNILSTTPGNNYASFNGTSMAAPHVAGAAALIKAKYPSMTNVQIRERLANTATNLGDPFFYGKGVINVESALQ

SEQ ID NO: 68921 - protein, 275 aa, Bacillus sp. LG1
AQTVPWGIPHIKADKAHAAGVMGSGVKVAILDTGIDANHADLNVKGGASFVSGEPNALQDGNGHGTHVAGTVAALNNTTGVLGVAYNADLYAVKVLSASGSGTLSGIAQGIEWSISNGMNVINMSLGGSSGSTALQQACNNAYNRGIVVIAAAGNSGSSGNRNTMGYPARYSSVIAVGAVSSNNTRASFSSVGSELEVMAPGVNILSTTPGNNYASFNGTSMAAPHVAGAAALIKAKYPSMTNVQIRERLKNTATNLGDPFFYGKGVINVESALQ

SEQ ID NO: 68922 - protein, 275 aa, Bacillus sp. LG1
AQTVPWGIPHIKADKAHAAGVTGSGVKVAILDTGIDANHADLNVKGGASFVSGEPNALQDGNGHGTHVAGTVAALNNTTGVLGVAYNADLYAVKVLSASGSGTLSGIAQGIEWSISNGMNVINMSLGGSSGSTALQQACNNAYNRGIVVIAAAGNSGSSGNRNTMGYPARYSSVIAVGAVSSNNTRASFSSVGSELEVMAPGVNILSTTPGNNYASHNGTSMAAPHVAGAAALIKAKYPSMTNVQIRERLKNTATNLGDPFFYGKGVINVESALQ

SEQ ID NO: 68923 - protein, 275 aa, Bacillus sp. LG1
AQTVPWGIPHIKADKAHAAGVTGSGVKVAILDTGIDANHADLNVKGGASFVSGEPNALQDGNGHGTHVAGTVAALNNTTGVLGVAYNADLYAVKVLSASGSGTLSGIAQGIEWSISNGMNVINMSLGGSSGSTALQQACNNAYNRGIVVIAAAGNSGSSGNRNTMGYPARYSSVIAVGAVSSNNTRASFSSVGSELEVMAPGVNILSTTPGNNYASDNGTSMAAPHVAGAAALIKAKYPSMTNVQIRERLKNTATNLGDPFFYGKGVINVESALQ

SEQ ID NO: 68924 - protein, 275 aa, Bacillus sp. LG1
AQTVPWGIPHIKADKAHAAGVTGSGVKVAILDTGIDANHADLNVKGGASFVSGEPNALQDGNGHGTHVAGTVAALNNTTGVLGVAYNGDLYAVKVLSASGSGTLSGIAQGIEWSISNGMNVINMSLGGSSGSTALQQACNNAYNRGIVVIAAAGNSGSSGNRNTMGYPARYSSVIAVGAVSSNNTRASFSSVGSELEVMAPGVNILSTTPGNNYASFNGTSMAAPHVAGAAALIKAKYPSMTNVQIRERLKNTATNLGDPFFYGKGVINVESALQ

SEQ ID NO: 68925 - protein, 275 aa, Bacillus sp. LG1
AQTVPWGIPHIKADKHHAAGVTGSGVKVAILDTGIDANHADLNVKGGASFVSGEPNALQDGNGHGTHVAGTVAALNNTTGVLGVAYNADLYAVKVLSASGSGTLSGIAQGIEWSISNGMNVINMSLGGSSGSTALQQACNNAYNRGIVVIAAAGNSGSSGNRNTMGYPARYSSVIAVGAVSSNNTRASFSSVGSELEVMAPGVNILSTTPGNNYASFNGTSMAAPHVAGAAALIKAKYPSMTNVQIRERLKNTATNLGDPFFYGKGVINVESALQ

SEQ ID NO: 68926 - protein, 275 aa, Bacillus sp. LG1
AQTVPWGIPHIKADKAHAAGVTGSGVKVAILDTGIDANHADLNVKGGASFVSGEPNALQDGNGHGTHVAGTVAALNNTTGVLGVAWNADLYAVKVLSASGSGTLSGIAQGIEWSISNGMNVINMSLGGSSGSTALQQACNNAYNRGIVVIAAAGNSGSSGNRNTMGYPARYSSVIAVGAVSSNNTRASFSSVGSELEVMAPGVNILSTTPGNNYASFNGTSMAAPHVAGAAALIKAKYPSMTNVQIRERLKNTATNLGDPFFYGKGVINVESALQ

SEQ ID NO: 68927 - protein, 275 aa, Bacillus sp. LG1
AQTVPWGIPHIKADKAHAAGVTGSGVKVAILDTGIDANHADLNVKGGASFVSGEPNALQDGNGHGTHVAGTVAALNNTTGVLGVAYNADLYAVKVLSASGSGTLSGIAQGIEWSISNGMNVINMSLGGSSGSTALQQACNNAYNRGIVVIAAAGNSGSSGNRNTMGYPARYSSVIAVGAVSSNNTRASFSSVGSELEVMAPGVNILSTTPGNNYASFNGTSMAAPHVAGAAALIKAKYPSMTNVQNRERLKNTATNLGDPFFYGKGVINVESALQ

SEQ ID NO: 68928 - protein, 275 aa, Bacillus sp. LG1
AQTVPWGIPHIKADKAHAAGVTGSGVKVAILDTGIDANHADLNVKGGASFVSGEPNALQDGNGHGTHVAGTVAALNNTTGVLGVAYNADLYAVKVLSASGSGTLSGIAQGIEWSISNGMNVINMSLGGSSGSTALQQACNNAYNRGIVVIAAAGNSGSSGNRNTMGYPARYSSVIAVGAVSSNNTRASFSSVGSELEVMAPGVNILSTTPGNNYASFNGTSMAAPHVAGAAALIKAKYPSMTNVQIRERLKNTATNLGDPFFYGKGIINVESALQ

SEQ ID NO: 68929 - protein, 275 aa, Bacillus sp. LG1
AQTVPWGIPHIKADKAHAAGVTGSGVKVAILDTGIDANHADLNVKGGASFVSGEPNALQDGNGHGTHVAGTVAALNNTTGVLGVAYNADLYAVKVLSHSGSGTLSGIAQGIEWSISNGMNVINMSLGGSSGSTALQQACNNAYNRGIVVIAAAGNSGSSGNRNTMGYPARYSSVIAVGAVSSNNTRASFSSVGSELEVMAPGVNILSTTPGNNYASFNGTSMAAPHVAGAAALIKAKYPSMTNVQIRERLKNTATNLGDPFFYGKGVINVESALQ

SEQ ID NO: 68930 - protein, 275 aa, Bacillus sp. LG1
AQTVPWGIPHIKADKAHAAGVTGSGVKVAILDTGIDANHADLNVKGGASFVSGEPNALQDGNGHGTHVAGTVAALNNTTGVLGVAYNADLYAVKVLSASGSGTLSGIAQGIEWSISNGMNVINMSLGGSSGSTALQQACNNAYNRGIVVIAAAGNSGSSGNRNTMGYPARYSSVIAVGAVQSNNTRASFSSVGSELEVMAPGVNILSTTPGNNYASFNGTSMAAPHVAGAAALIKAKYPSMTNVQIRERLKNTATNLGDPFFYGKGVINVESALQ

SEQ ID NO: 68931 - protein, 275 aa, Bacillus sp. LG1
AQTVPWGIPHIKADKAHAAGVTGSGVKVAILDTGIDANHADLNVKGGASFVSGEPNALQDGNGHGTHVAGTVAALNNTTGVLGVAYNADLYAVKVLSASGSGTLSGIAQGIEWSISNGMNVINMSLGGSSGSTALQQACNNAYNRGIVVIAAAGNSGSSGNRNTMGYPARYSSVIAVGAVSSNNTRASFSSVGSELEVMAPGVNILSTTPGNNYASFNGTSMAAPHVAGAAALIKAKYPSMTNVQIRERLKNTATLLGDPFFYGKGVINVESALQ

SEQ ID NO: 68932 - protein, 275 aa, Bacillus subtilis
AQTTPWGITHINAHKAHSSSVTGSGVKVAVLDTGIDASHEDLNVKGGASFISGEPNALVDTNGHGTHVAGTVAALNNTIGVVGVAYNADLYAVKVLSASGSGTLSGIAQGVEWAIANNMDVINMSLGGSSGSTALKQAVDNAYASGIVVVAAAGNSGTRGRQNTMQYPARYSSVIAVGAVDSNNNRASFSSVGAELEVMAPGVSVLSTVPGGGYASYSGTSMASPHVAGAAALIKAKYPSLSASQIRDRLRNTATYLGDPFYYGNGVINVERALQ

SEQ ID NO: 68933 - protein, 275 aa, Bacillus subtilis
AQTTPWGIEHINAHKAHSSSVTGSGVKVAVLDTGIDASHEDLNVKGGASFISGEPNALVDTNGHGTHVSGTVAALNNNIGVVGVAYNADLYAVKVLSASGSGTLSGIAQGVEWAIANNMDVINMSLGGSSGSTALKQAVDNAYASGIVVVAAAGNSGTRGRQNTMGYPARYSSVIAVGAVDSNNNRASFSSVGAELEVMAPGVSVLSTVPGGGYASYNGTSMASPHVAGAAALIKAKYPSLSASQIRDRLRNTATYLGDPFYYGNGVINVERALQ

SEQ ID NO: 68934 - protein, 275 aa, Bacillus sp. LG1
AQTVPWGIPHIKADKAHAAGVTGSGVKVAILDTGIDANHADLNVKGGASFVSGEPNALQDGNGHGTHVAGTVAALNNTTGVLGVAYNADLYAVKVLSASGSGTLSGIAQGIEWSISNGMNVINMSLGGSSGSTALQQACNNAYNRGIVVIAAAGNSGSSGNRNTMGYPARYSSVIAVGAVSSNNTRASFSSVGSELEVMAPGINILSTTPGNNYASFNGTSMAAPHVAGAAALIKAKYPSMTNVQIRERLKNTATNLGDPFFYGKGVINVESALQ

SEQ ID NO: 68935 - protein, 275 aa, Bacillus sp. LG1
AQTVPWGIPHIKADKAHAAGVTGSGVKVAILDTGIDANHADLNVKGGASFVSGEPNALQDGNGHGTHVAGTVAALNNTTGVLGVAYNADLYAVKVLSASGSGTLSGIAQGIEWSISNGMNVINMSLGGSSGSTALQQACNNAYNRGIVVIAAAGNSGSSGNRNTMGYPARYSSVIAVGAVSSNNTRASFSSVGSELEVMAPGVNILSTFPGNNYASFNGTSMAAPHVAGAAALIKAKYPSMTNVQIRERLKNTATNLGDPFFYGKGVINVESALQ

SEQ ID NO: 68936 - protein, 275 aa, Bacillus sp. LG1
AQTVPWGIPHIKADKAHAKGVTGSGVKVAILDTGIDANHADLNVKGGASFVSGEPNALQDGNGHGTHVAGTVAALNNTTGVLGVAYNADLYAVKVLSASGSGTLSGIAQGIEWSISNGMNVINMSLGGSSGSTALQQACNNAYNRGIVVIAAAGNSGSSGNRNTMGYPARYSSVIAVGAVSSNNTRASFSSVGSELEVMAPGVNILSTTPGNNYASFNGTSMAAPHVAGAAALIKAKYPSMTNVQIRERLKNTATNLGDPFFYGKGVINVESALQ

SEQ ID NO: 68937 - protein, 275 aa, Bacillus sp. LG1
AQTVPWGIPHIKADKAHAAGVTGSGVKVAILDTGIDANHADLNVKGGASFVSGEPNALQDGNGHGTHVAGTVAALNNTTGVLGVAYNADLYAVKVLSASGSGTLSGIAQGIEWSISNGMNVINMSLGGSSGSTALQQACNNAYNRGIVVIAAAGNSGSSGNRNTMGYPARYSSVIAVGAVSSNNTRASFSSVGSELEVMAPGVNILSTTPGNNYASFNGTSMAAPHVAGAAALIKAKYPSMHNVQIRERLKNTATNLGDPFFYGKGVINVESALQ

SEQ ID NO: 68938 - protein, 275 aa, Bacillus sp. LG1
AQTVPWGIPHIKADKAHAAGVTGSGVKVAILDTGIDANHADLNVKGGASFVSGEPNALQDGNGHGTHVAGTVAALNNTTGVLGVAYNADLYAVKVLSASGSGTLSGIAQGIEWSISNGMNVINMSLGGSSGSTALQQACNNAYNRGIVVIAAAGNSGSSGNRNTMGYPARYSSVIAVGAVSSNNTRASFSSVGSELEVMAPGVNILSTTPGNNYASFNGTSMAAPHVAGAAALIKAKYPMMTNVQIRERLKNTATNLGDPFFYGKGVINVESALQ

SEQ ID NO: 68939 - protein, 275 aa, Bacillus sp. LG1
AQTVPWGIPHIKADKAHAAGVTGSGVKVAILDTGIDANHADLNVKGGASFVSGEPNALQDGNGHGTHVAGTVAALNNTTGVLGVAYNADLYAVKVLSASGSGTLSGIAQGIEWSISNGMNVINMSLGGSSGSTALQQACLNAYNRGIVVIAAAGNSGSSGNRNTMGYPARYSSVIAVGAVSSNNTRASFSSVGSELEVMAPGVNILSTTPGNNYASFNGTSMAAPHVAGAAALIKAKYPSMTNVQIRERLKNTATNLGDPFFYGKGVINVESALQ

SEQ ID NO: 68940 - protein, 275 aa, Bacillus sp. LG1
AQTVPWGIPHIKADKAHAAGVTGSGVKVAILDTGIDANHADLNVKGGASFVSGEPNALQDGNGHGTHVAGTVAALNNTTGVLGVAYNADLYAVKVLSASGSGTLSGIAQGIEWSISNGMNVINMSLGGSSGSTALQQACNNAYNRGIVVIAAAGNSGSSGNRNTMGYPARYSSVIAVGAVSSNNTRASFSSVGSELEVMAPGVNILSTTPGNNYASFNGTSMAAPHVAGAAALIKAKYPSMTNVQIRERLKNTATNLGDPFFYGKGKINVESALQ

SEQ ID NO: 68941 - protein, 275 aa, Bacillus sp. LG1
AQTVPWGIPHIKADKAHAAGVTGSGVKVAILDTGIDANHADLNVKGGASFVSGEPNALQDGNGHGTHVAGTVAALNNTTGVLGVAYNADLYAVKVLSASGSGTLSGIAQGIEWSISNGMNVINMSLGGSSGSTALQQACNNAYNRGIVVIAAAGNSGSSGNRNTMGYPARYMSVIAVGAVSSNNTRASFSSVGSELEVMAPGVNILSTTPGNNYASFNGTSMAAPHVAGAAALIKAKYPSMTNVQIRERLKNTATNLGDPFFYGKGVINVESALQ

SEQ ID NO: 68942 - protein, 275 aa, Bacillus sp. LG1
AQTVPWGIPHIKADKAHAAGVTGSGVKVAILDTGIDANHADLNVKGGASFVSGEPNALQDGNGHGTHVAGTVAALNNTTGVLGVAYNADLYAVKVLSASGSGTLSGIAQGIEWSISNGMNVINMSLGGSSGSTALQQACNNAYNRGIVVIAAAGNSGSSGNRNTMGYPARYSSVIAVGAVSSNNTRASFSSVGSELEVMAPGVNINSTTPGNNYASFNGTSMAAPHVAGAAALIKAKYPSMTNVQIRERLKNTATNLGDPFFYGKGVINVESALQ

SEQ ID NO: 68943 - protein, 275 aa, Bacillus sp. LG1
AQTVPWGIPHIKADKAHAAGVTGSGVKVAILDTGIDANHADLNVQGGASFVSGEPNALQDGNGHGTHVAGTVAALNNTTGVLGVAYNADLYAVKVLSASGSGTLSGIAQGIEWSISNGMNVINMSLGGSSGSTALQQACNNAYNRGIVVIAAAGNSGSSGNRNTMGYPARYSSVIAVGAVSSNNTRASFSSVGSELEVMAPGVNILSTTPGNNYASFNGTSMAAPHVAGAAALIKAKYPSMTNVQIRERLKNTATNLGDPFFYGKGVINVESALQ

SEQ ID NO: 68944 - protein, 275 aa, Bacillus sp. LG1
AQTVPWGIPHIKADKAHAAGVTGSGVKVAELDTGIDANHADLNVKGGASFVSGEPNALQDGNGHGTHVAGTVAALNNTTGVLGVAYNADLYAVKVLSASGSGTLSGIAQGIEWSISNGMNVINMSLGGSSGSTALQQACNNAYNRGIVVIAAAGNSGSSGNRNTMGYPARYSSVIAVGAVSSNNTRASFSSVGSELEVMAPGVNILSTTPGNNYASFNGTSMAAPHVAGAAALIKAKYPSMTNVQIRERLKNTATNLGDPFFYGKGVINVESALQ

SEQ ID NO: 68945 - protein, 275 aa, Bacillus sp. LG1
AQTVPWGIPHIKADKAHAAGVTGSGVKVAILDTGIDANHADLNVKGGASFVSGEPNALQDGNGHGTHVAGTVAALNNTTGVLGVAYNAWLYAVKVLSASGSGTLSGIAQGIEWSISNGMNVINMSLGGSSGSTALQQACNNAYNRGIVVIAAAGNSGSSGNRNTMGYPARYSSVIAVGAVSSNNTRASFSSVGSELEVMAPGVNILSTTPGNNYASFNGTSMAAPHVAGAAALIKAKYPSMTNVQIRERLKNTATNLGDPFFYGKGVINVESALQ

SEQ ID NO: 68946 - protein, 275 aa, Bacillus sp. LG1
AQTVPWGIPHIKADKAHAAGVTGSGVKVAILDTGIDANHADLNVKGGASFVSGEPNALQDGNGHGTHVAGTVAALNNTTGVLGVAYNADLYAVKVLSASGSGTLSGIAQGIEWSISNGMNVINMSLGGSSGSTALQQACNNAYNRGIVVIAAAGNSGSSGNRNTMGYPARYSSVIAVGAVSSNNTRASFSSVGSELEVMAPGVNILSTTPGNNYASFNGTSMAAPHVAGAAALIKFKYPSMTNVQIRERLKNTATNLGDPFFYGKGVINVESALQ

SEQ ID NO: 68947 - protein, 275 aa, Bacillus sp. LG1
AQTVPWGIPHIKADKAHAAGVTGSGVKVAILDTGIDANHADLNVKGGASFVSGEPNALQDGNGHGTHVAGTVAALNNTTGVLGVAYNADLYAVKVLSASGSGTLSGIAQGIEWSISNGMNVINMSLGGSSGSTALQQACNNAYNRGIVVIAAAGNSGSSGNRNTMGYPARYSSVIAVGAVSSNNTRASFSSVGSELEVMAPGVNILSTTPGNNYASFNGTSMAAPHVAGAAALIKAKYPSMTNVQIRERLKNTATNLGDPFFYGKGVINVEFALQ

SEQ ID NO: 68948 - protein, 275 aa, Bacillus sp. LG1
AQTVPWGIPHIKADKAHAAGVTGSGVKVAILDTGIDANHADLNVKGGASFVSGEPNALQDGNGHGTHVAGTVAALNNTTGVLGVAYNADLYAVKVLSASGSGTLSGIAQGIEWSISNGMNVINMSLGGSSGSTALQQACNNAYNRGIVVIAAAGNSGSSGNRNTMGYPARYSSVIAVGAVSSNNTRASFSSVGSELEVMAPGVNILSTTPGNNYASFNGTSMAAPHVAGAAALIKAKYPSMTNVQIRERLKNTATKLGDPFFYGKGVINVESALQ

SEQ ID NO: 68949 - protein, 275 aa, Bacillus sp. LG1
AQTVPWGIPHIKADKAHAAGVTGSGVKVAILDTGIDANHADLNVKGGASFVSGEPNALQDGNGHGTHVAGTVAALNNTTGVLGVAYNADLYAVKVLSASGSGTLSGIAQGIEWSISNGMNVINMSLGGSSGSTALQQACNNAYNRGIVVIAAAGNSGSSGNRNTMGYPARYSSVIAVGAVSSNNTRASFSSVGSELEVMAPGVNILSTTPGNNYASFNGTSMAAPHVAGAAALIKAKYPSMTNVQIRERLKNTATNLGDPFFYGKGVINVEMALQ

SEQ ID NO: 68950 - protein, 275 aa, Bacillus sp. LG1
AQTVPWGIPHIKADKAHAAGVTGSGVKVAILDTGIDANHADLNVKGGASFVSGEPNALQDGNGHGTHVAGTVAALNNTTGVLGVAYNADLYAVKVLSASGSGTLSGIAQGIEWSISNGMNVINMSLGGSSGSTALQQACNNAYNRGIVVIAAAGNSGSSGNRNTMGYPARYSSVIAVGAVSSNNTRASFSSVGSELEVMAPGVNILSTTPGNNYASFNGTSMAAPHVAGAAALIKAKYPSMTNVQIRERLKNTATNLGDPFSYGKGVINVESALQ

SEQ ID NO: 68951 - protein, 275 aa, Bacillus sp. LG1
AQTVPWGIPHIKADKAHAAGVTGSGVKVAILDTGIDANHNDLNVKGGASFVSGEPNALQDGNGHGTHVAGTVAALNNTTGVLGVAYNADLYAVKVLSASGSGTLSGIAQGIEWSISNGMNVINMSLGGSSGSTALQQACNNAYNRGIVVIAAAGNSGSSGNRNTMGYPARYSSVIAVGAVSSNNTRASFSSVGSELEVMAPGVNILSTTPGNNYASFNGTSMAAPHVAGAAALIKAKYPSMTNVQIRERLKNTATNLGDPFFYGKGVINVESALQ

SEQ ID NO: 68952 - protein, 275 aa, Bacillus sp. LG1
AQTVPWGIPHIKADKAHAAGVTGSGVKVAILDTGIDANHADLNVKGGASFVSGEGNALQDGNGHGTHVAGTVAALNNTTGVLGVAYNADLYAVKVLSASGSGTLSGIAQGIEWSISNGMNVINMSLGGSSGSTALQQACNNAYNRGIVVIAAAGNSGSSGNRNTMGYPARYSSVIAVGAVSSNNTRASFSSVGSELEVMAPGVNILSTTPGNNYASFNGTSMAAPHVAGAAALIKAKYPSMTNVQIRERLKNTATNLGDPFFYGKGVINVESALQ

SEQ ID NO: 68953 - protein, 275 aa, Bacillus sp. LG1
AQTVPWGIPHIKADKAHAAGVTGSGVKVAILDTGIDANHADLNVKGGASFVSGEPNALQDGNGHGTHVAGTVAALNNTTGVLGVAYNADLYAVKVLSASGSGTLSGIAQGIEWSISNGMNVINMSLGGSSGSTALQQACNNAYNRGIVVIAAAGNSGSSGNRNTMGYPARYSSVIAVGAVSSNNTRASFSSVGSELEVMAPGVNILSTTPGNNYASFNGTSMAAPHVAGAAALIKAKYPSMTNVQIRDRLKNTATNLGDPFFYGKGVINVESALQ

SEQ ID NO: 68954 - protein, 275 aa, Bacillus sp. LG1
AQTVPWGIPHIKADKAHAAGVTGSGVKVAILDTGIDANHADLNVKGGASFVSGEPNALQDGNGHGTHVAGTVAALNNTTGVLGVAYNADLYAVKVLSASGSGTLSGIAQGIEWSISNGMEVINMSLGGSSGSTALQQACNNAYNRGIVVIAAAGNSGSSGNRNTMGYPARYSSVIAVGAVSSNNTRASFSSVGSELEVMAPGVNILSTTPGNNYASFNGTSMAAPHVAGAAALIKAKYPSMTNVQIRERLKNTATNLGDPFFYGKGVINVESALQ

SEQ ID NO: 68955 - protein, 275 aa, Bacillus sp. LG1
AQTVPWGIPHIKADKAHAAGVTGSGVKVAILDTGIDANHADLNVKGGASFVSGEPNALQDGNGHGTHVAGTVAALNNTTGVLGVAYNADLYAVKVLSASGSGTLSGIAQGIEWSIMNGMNVINMSLGGSSGSTALQQACNNAYNRGIVVIAAAGNSGSSGNRNTMGYPARYSSVIAVGAVSSNNTRASFSSVGSELEVMAPGVNILSTTPGNNYASFNGTSMAAPHVAGAAALIKAKYPSMTNVQIRERLKNTATNLGDPFFYGKGVINVESALQ

SEQ ID NO: 68956 - protein, 275 aa, Bacillus sp. LG1
AQTVPWGIPHIKADKAHAAGVTGSGVKVAILDTGIDANHADLNVKGGASFVSGEPNALQDGNGHGTHVAGTVAALNNTTGVLGVAYNADLYAVKVLSASGSGTLSGIAQGIEWSISNGMNVINMSLGGSSGSTALQQACNNAYNRGIVVIAAAGNSGSSGNRNTMGYPARYSSVIAVGAVSSNNTRASFSSVGSELEVMAPGVNILSTTPGNNYASFNGTSMAAPHVAGAAALIKAKYPSMTNVQIRERLKNTATNLGDPFFYGKGVINVEQALQ

SEQ ID NO: 68957 - protein, 275 aa, Bacillus sp. LG1
AQTVPWGIPHIKADKAHAWGVTGSGVKVAILDTGIDANHADLNVKGGASFVSGEPNALQDGNGHGTHVAGTVAALNNTTGVLGVAYNADLYAVKVLSASGSGTLSGIAQGIEWSISNGMNVINMSLGGSSGSTALQQACNNAYNRGIVVIAAAGNSGSSGNRNTMGYPARYSSVIAVGAVSSNNTRASFSSVGSELEVMAPGVNILSTTPGNNYASFNGTSMAAPHVAGAAALIKAKYPSMTNVQIRERLKNTATNLGDPFFYGKGVINVESALQ

SEQ ID NO: 68958 - protein, 275 aa, Bacillus subtilis
AQTTPWGITHINAHKAHSSSVTGSGVKVAVLDTGIDASHPDLNVKGGASFISGEPNALVDTNGHGTHVSGTVAALNNNIGVVGVAYNADLYAVKVLSASGSGTLSGIAQGVEWAIANNMDVINMSLGGSSGSTALKQAVDNAYASGIVVVAAAGNSGTRGRQNTMGYPARYSSVIAVGAVDSNNNRASFSSVGAELEVMAPGVSVLSTVPGGGYASYSGTSMASPHVAGAAALIKAKYPSLSASQIRDRLRNTATYLGDPFYYGNGVINVERALQ

SEQ ID NO: 68959 - protein, 275 aa, Bacillus sp. LG1
AQTVPWGIPHIKADKAHAAGVTGSGVKVAILDTGIDANHADLNVKGGASFVSGEPNALQDGNGHGTHVAGTVAALNNTTGVLGVAYNADLYAVKVLSASGSGTLSGIAQGIEWSISNGMNVINMSLGGSSGSTALQQACNNAYNRGIVVIAAAGNSGSSGNRNTMGYPARYSSVIAVGAVSSNNTRASFSSVGSELEVMAPGVNILSTTPGNNYASFNGTSMAAPHVAGAAALIKAKYPSMTNVQIRERLKNTATNLGDPFFYGKGVINVEVALQ

SEQ ID NO: 68960 - protein, 275 aa, Bacillus sp. LG1
AQTVPWGIPHIKADKAHAAGVTGSGVKVAILDTGIDANHADLNVKGGASFVSGEPNALQDGNGHGTHVAGTVAALNNTTGVLGVAYNADLYAVKVLSASGSGTLSGIAQGIEWSISNGMNVINMSLGGSSGSTAIQQACNNAYNRGIVVIAAAGNSGSSGNRNTMGYPARYSSVIAVGAVSSNNTRASFSSVGSELEVMAPGVNILSTTPGNNYASFNGTSMAAPHVAGAAALIKAKYPSMTNVQIRERLKNTATNLGDPFFYGKGVINVESALQ

SEQ ID NO: 68961 - protein, 275 aa, Bacillus sp. LG1
AQTVPWGIPHIKADKAHAAGVTGSGVKVAILDTGIDANHADLNVKGGASFVSGEPNALQDGNGHGTHVAGTVAALNNTTGVLGVAYNADLYAVKVLSASGSGTLSGIAQGIEWSISNGMNVINMSLGGSSGSTALQQACNNAYNRGIVVIAAAGNSGSSGNRNTMGYPARYSSVIAVGAVSSNNTRASFSSVGIELEVMAPGVNILSTTPGNNYASFNGTSMAAPHVAGAAALIKAKYPSMTNVQIRERLKNTATNLGDPFFYGKGVINVESALQ

SEQ ID NO: 68962 - protein, 275 aa, Bacillus sp. LG1
AQTVPWGIPHIKADKAHAAGVSGSGVKVAILDTGIDANHADLNVKGGASFVSGEPNALQDGNGHGTHVAGTVAALNNTTGVLGVAYNADLYAVKVLSASGSGTLSGIAQGIEWSISNGMNVINMSLGGSSGSTALQQACNNAYNRGIVVIAAAGNSGSSGNRNTMGYPARYSSVIAVGAVSSNNTRASFSSVGSELEVMAPGVNILSTTPGNNYASFNGTSMAAPHVAGAAALIKAKYPSMTNVQIRERLKNTATNLGDPFFYGKGVINVESALQ

SEQ ID NO: 68963 - protein, 275 aa, Bacillus sp. LG1
AQTVPWGIPHIKADKAHAAGVTGSGVKVAILDTGIDANHADLNVKGGASFVSGEPNALQDGNGHGTHVAGTVAALNNTTGVLGVAYNADLYAVKVLSASGSGTLSGIAQGIEWSISNGMNVINMSLGGSSGSTALQQACNNAYNRGIVVIAAAGNSGSSGNRNTMGYPARYSSVIAVGAVSSNNTRASFSSVGSELEVMAPGVNILSTTPGNAYASFNGTSMAAPHVAGAAALIKAKYPSMTNVQIRERLKNTATNLGDPFFYGKGVINVESALQ

SEQ ID NO: 68964 - protein, 275 aa, Bacillus sp. LG1
AQTVPWGIPHIKADKAHAAGVTGSGVKVAILDTGIDANHADLNVKGGASFVSGEPPALQDGNGHGTHVAGTVAALNNTTGVLGVAYNADLYAVKVLSASGSGTLSGIAQGIEWSISNGMNVINMSLGGSSGSTALQQACNNAYNRGIVVIAAAGNSGSSGNRNTMGYPARYSSVIAVGAVSSNNTRASFSSVGSELEVMAPGVNILSTTPGNNYASFNGTSMAAPHVAGAAALIKAKYPSMTNVQIRERLKNTATNLGDPFFYGKGVINVESALQ

SEQ ID NO: 68965 - protein, 275 aa, Bacillus sp. LG1
AQTVPWGIPHIKADKAHAAGVTGSGVKVAILDTGIDANHADLNVKGGASFVSGEPNALQDGNGHGTHVAGTVAALNNTTGVLGVAYNADLYAVKVLSASGSGTLSGIAQGIEWSISNGMNVINMSLGGSSGSTALHQACNNAYNRGIVVIAAAGNSGSSGNRNTMGYPARYSSVIAVGAVSSNNTRASFSSVGSELEVMAPGVNILSTTPGNNYASFNGTSMAAPHVAGAAALIKAKYPSMTNVQIRERLKNTATNLGDPFFYGKGVINVESALQ

SEQ ID NO: 68966 - protein, 275 aa, Bacillus sp. LG1
AQTVPWGIPHIKADKAHAAGVTGSGVKVAILDTGIDANHADLNVKGGASFVSGEPNALQDGNGHGTHVAGTVAALNNTTGVLGVAYNADLYAVKVLSASGSGTLSGIAQGIEWSISNGMNVINMSLGGSSGSTALQQACMNAYNRGIVVIAAAGNSGSSGNRNTMGYPARYSSVIAVGAVSSNNTRASFSSVGSELEVMAPGVNILSTTPGNNYASFNGTSMAAPHVAGAAALIKAKYPSMTNVQIRERLKNTATNLGDPFFYGKGVINVESALQ

SEQ ID NO: 68967 - protein, 275 aa, Bacillus sp. LG1
AQTVPWGIPHIKADKAHAAGVTGSGVKVAILDTGIDANHADLNVKGGASFVSGEPNALQDGNGHGTHVAGTVAALNNTTGVLGVAYNADLYAVKVLSASGSGTLSGIAQGIEWSISNGMNVINMSLGGSSGSTALQQACNNAYNRGIVVIAAAGNSGSSGNRNTMGYPARYSSVIAVGAVSSNNFRASFSSVGSELEVMAPGVNILSTTPGNNYASFNGTSMAAPHVAGAAALIKAKYPSMTNVQIRERLKNTATNLGDPFFYGKGVINVESALQ

SEQ ID NO: 68968 - protein, 275 aa, Bacillus subtilis
AQTTPWGIEHINAHKAHSSSVTGSGVKVAVLDTGIDASHEDLNVKGGASFISGEPNALVDTNGHGTHVAGTVAALNNNIGVVGVAYNADLYAVKVLSASGSGTLSGIAQGVEWAIANNMDVINMSLGGSSGSTALKQAVDNAYASGIVVVAAAGNSGTRGRQNTMGYPARYSSVIAVGAVDSNNQRASFSSVGAELEVMAPGVSVLSTVPGGGYASYNGTSMASPHVAGAAALIKAKYPSLSASQIRDRLRNTATYLGDPFYYGNGVINVERALQ

SEQ ID NO: 68969 - protein, 275 aa, Bacillus sp. LG1
AQTVPWGIPHIKADKAPAAGVTGSGVKVAILDTGIDANHADLNVKGGASFVSGEPNALQDGNGHGTHVAGTVAALNNTTGVLGVAYNADLYAVKVLSASGSGTLSGIAQGIEWSISNGMNVINMSLGGSSGSTALQQACNNAYNRGIVVIAAAGNSGSSGNRNTMGYPARYSSVIAVGAVSSNNTRASFSSVGSELEVMAPGVNILSTTPGNNYASFNGTSMAAPHVAGAAALIKAKYPSMTNVQIRERLKNTATNLGDPFFYGKGVINVESALQ

SEQ ID NO: 68970 - protein, 275 aa, Bacillus sp. LG1
AQTVPWGIPHIKADKAHAAGVTGSGVKVAILDTGIDANHADLNVKGGASFVSGEPNALQDGNGHGTHVAGTVAALNNTTGVLGVAYNADLYAVKVLSASGSGTLSGIAQGIEWSISNGMNVINMSLGGSSGSTALQQACNNAYNRGIVVIAAAGNSGSSGNRNTMGYPARYSSVIAVGAVSSNNTRASFSSVGSELEVMAPGVNILSTTPGNNYASFNGTSMAAPHVAGAAALIKAKYPSMTNVQIRERLKNTATMLGDPFFYGKGVINVESALQ

SEQ ID NO: 68971 - protein, 275 aa, Bacillus sp. LG1
AQTVPWGIPHIKADKAHAAGVTGSGVKVAILDTGIDANHADLNVKGGASFVSGEPNALQDGNGHGTHVAGTVAALNNTTGVLGVAYNADLYAVKVLSASGSGTLSGIAQGIEWSISNGMNVINMSLGGYSGSTALQQACNNAYNRGIVVIAAAGNSGSSGNRNTMGYPARYSSVIAVGAVSSNNTRASFSSVGSELEVMAPGVNILSTTPGNNYASFNGTSMAAPHVAGAAALIKAKYPSMTNVQIRERLKNTATNLGDPFFYGKGVINVESALQ

SEQ ID NO: 68972 - protein, 275 aa, Bacillus sp. LG1
AQTVPWGIPHIKADKAHAAGVTGSGVKVAILDTGIDANHADLNVKGGASFVSGEPNALQDGNGHGTHVAGTVAALNNTTGVLGVAYNADLYAVKVLSASGSGTLSGIAQGIEWSISNGMNVINMSLGGSSGSTALQQACNNAYNRGIVVIAAAGNSGSSGNRNTMGYPARYSSVIAVGAVSSNNTRASFSSVGSELEVMAPGVNILSTTPGNNYASFNGTSMAAPHVAGAAALIKAKYPSITNVQIRERLKNTATNLGDPFFYGKGVINVESALQ

SEQ ID NO: 68973 - protein, 275 aa, Bacillus sp. LG1
AQTVPWGIPHIKADKAHAAGVTGSGVKVAILDTGIDANHADLNVKGGASFVSGEPNAAQDGNGHGTHVAGTVAALNNTTGVLGVAYNADLYAVKVLSASGSGTLSGIAQGIEWSISNGMNVINMSLGGSSGSTALQQACNNAYNRGIVVIAAAGNSGSSGNRNTMGYPARYSSVIAVGAVSSNNTRASFSSVGSELEVMAPGVNILSTTPGNNYASFNGTSMAAPHVAGAAALIKAKYPSMTNVQIRERLKNTATNLGDPFFYGKGVINVESALQ

SEQ ID NO: 68974 - protein, 275 aa, Bacillus sp. LG1
AQTVPWGIPHIKADKAHAAGVTGSGVKVAILDTGIDANHADLNVKGGASFVSGEPNALQDGNGHGTHVAGTVAALNNTTGVLGVAYNADLYAVKVLSASGSGTLSGIAQGIEWSISNGMNVINMSLGGSSGSTALQQACNNAYNRGIVVIAAAGNSGSSGNRNTMGYPARYSSVIAVGAVSSNNTRASFSSVGSELEVMAPGVNILSTTPGNNYASFNGTSMAAPHVAGAAALIKAKYPSMTNVQIRERLFNTATNLGDPFFYGKGVINVESALQ

SEQ ID NO: 68975 - protein, 274 aa, Bacillus sp.
AQTVPWGIPHIKADKAHAAGVTGSGVKVAILDTGIDANHADLNVKGGASFVSGEPNAQDGNGHGTHVAGTVAALNNTTGVLGVAYNADLYAVKVLSASGSGTLSGIAQGIEWSISNGMNVINMSLGGSSGSTALQQACNNAYNRGIVVIAAAGNSGSSGNRNTMGYPARYSSVIAVGAVSSNNTRASFSSVGSELEVMAPGVNILSTTPGNNYASFNGTSMAAPHVAGAAALIKAKYPSMTNVQIRERLKNTATNLGDPFFYGKGVINVESALQ

SEQ ID NO: 68976 - protein, 275 aa, Bacillus sp. LG1
AQTVPWGIPHIKADKAHAAGVTGSGVKVAILDTGIDANHADLNVKGGASFVSGEPNMLQDGNGHGTHVAGTVAALNNTTGVLGVAYNADLYAVKVLSASGSGTLSGIAQGIEWSISNGMNVINMSLGGSSGSTALQQACNNAYNRGIVVIAAAGNSGSSGNRNTMGYPARYSSVIAVGAVSSNNTRASFSSVGSELEVMAPGVNILSTTPGNNYASFNGTSMAAPHVAGAAALIKAKYPSMTNVQIRERLKNTATNLGDPFFYGKGVINVESALQ

SEQ ID NO: 68977 - protein, 275 aa, Bacillus sp. LG1
AQTVPWGIPHIKADKAHAAGVTGSGVKVAILDTGIDAAHADLNVKGGASFVSGEPNALQDGNGHGTHVAGTVAALNNTTGVLGVAYNADLYAVKVLSASGSGTLSGIAQGIEWSISNGMNVINMSLGGSSGSTALQQACNNAYNRGIVVIAAAGNSGSSGNRNTMGYPARYSSVIAVGAVSSNNTRASFSSVGSELEVMAPGVNILSTTPGNNYASFNGTSMAAPHVAGAAALIKAKYPSMTNVQIRERLKNTATNLGDPFFYGKGVINVESALQ

SEQ ID NO: 68978 - protein, 275 aa, Bacillus subtilis
AQTTPWGITHINAHKAHSSSVTGSGVKVAVLDTGIDASHEDLNVKGGASFISGEPNALVDTNGHGTHVAGTVAALNNNIGVVGVAYNADLYAVKVLSASGSGTLSGIAQGVEWAIANNMDVINMSLGGSSGSTALKQAVDNAYASGIVVVAAAGNSGTRGRQNTMGYPARYSSVIAVGAVDSNNQRASFSSVGAELEVMAPGVSVLSTVPGGGYASYNGTSMASPHVAGAAALIKAKYPSLSASQIRDRLRNTATYLGPPFYYGNGVINVERALQ

SEQ ID NO: 68979 - protein, 275 aa, Bacillus sp. LG1
AQTVPWGIPHIKADKAHAAGVTGSGVKVAILDTGIDANHADLNVKGGASFVSGEPNALQDGNGHGTHVAGTVAALNNTTGVLGVAYNADLYAVKVLSASGSGYLSGIAQGIEWSISNGMNVINMSLGGSSGSTALQQACNNAYNRGIVVIAAAGNSGSSGNRNTMGYPARYSSVIAVGAVSSNNTRASFSSVGSELEVMAPGVNILSTTPGNNYASFNGTSMAAPHVAGAAALIKAKYPSMTNVQIRERLKNTATNLGDPFFYGKGVINVESALQ

SEQ ID NO: 68980 - protein, 275 aa, Bacillus sp. LG1
AQTVPWGIPHIKADKAHAAGVTGSGVKVAILDTGIDANHADLNVKGGASFVSGEPNALQDGNGHGTHVAGTVAALNNTTGVLGVAYNADLYAVKVLSASGSGTLSGIAQGIEWSISNGMNVINMSLGGSSGSTALQQACNNAYNRGIVVIAAAGNSGSSGNRNTMGYPARYSSVIAVGAVSSNNTRASFSSVGSELEVMAPGVNILSTTPGNNYASFNGTSMAAPHVAGAAALIKAKYPSMTNVQIRERLKNTATNLGDIFFYGKGVINVESALQ

SEQ ID NO: 68981 - protein, 275 aa, Bacillus sp. LG1
AQTVPWGIPHIKADKAHAAGVTGSGVKVAILDTGIDANHADLNVKGGASFVSGEPNALQDGNGHGTHVAGTVAALNNTTGVLGVAYNADLYAVKVLSASGSGTLSGIAQGIEWSISNGMNVINMSLGGSSGSTALQQACNNAYNRGIVVIAAAGNSGSSGNRNTMGYPARYSSVIAVGAVSSNNTRASFSSVGSELEVMAPGVNILSTTPGNGYASFNGTSMAAPHVAGAAALIKAKYPSMTNVQIRERLKNTATNLGDPFFYGKGVINVESALQ

SEQ ID NO: 68982 - protein, 275 aa, Bacillus sp. LG1
AQTVPWGIPHIKADKAHAAGVTGSGVKVAILDTGIDANHADLNVKGGASFVSGEPNALQDGNGHGTHVAGTVAALNNTTGVLGVAYNADLYAVKVLSASGSGTLSGIAQGIEWSISNGMNVINMSLGGSSGSTALQQACNNAYNRGIVVIAAAGNSGSSGNRNTMGYPARYSSVIAVGAVSSNNTRASFSSVGSELEVMAPGVNILSTTPGNNYASFNGTSMAAPHVAGAAALIKAKYPSMLNVQIRERLKNTATNLGDPFFYGKGVINVESALQ

SEQ ID NO: 68983 - protein, 275 aa, Bacillus sp. LG1
AQTVPWGIPHIKADKAHAAGVTGSGVKVAILDTGIDANHADLNVKGGASFVSGEPNALQDGNGHGTHVAGTVAALNNTTGVLGVAYNADLYAVKVLSASGSGTLSGIAQGIEWSISNGMNVINMSLGGSSGSTALQQACNNAYNRGIVVIAAAGNSGSSGNRNTMGYPARYSSVIAVGAVSSNNTRASFSSVGSELEVMAPGVNILSTTPGNNYASFNGTSMAAPHVAGAAALIKAKYPSMTNVQIRERLKNTATNLGDPFFYGKGEINVESALQ

SEQ ID NO: 68984 - protein, 275 aa, Bacillus sp. LG1
AQTVPWGIPHIKADKAHAAGVTGSGVKVAILDTGIDANHADLNVKGGASFVSGEPNALQDGNGHGTHVAGTVAALNNTTGVLGVAYNADLYAVKVLSASGSGTLSGIAQGIEWSISNGMNVINMSLGGSSGSTALQQACNNAYNRGIVVIAAAGNSGSSGNRNTMGYPARYSSVIAVGAVSSNNTRASFSSVGSELEVMAPGVNILSTTPGNNYASFNGTSMAAPHVAGAAALIGAKYPSMTNVQIRERLKNTATNLGDPFFYGKGVINVESALQ

SEQ ID NO: 68985 - protein, 275 aa, Bacillus sp. LG1
AQTVPWGIPHIKADKAHAAGVTGSGVKVAILDTGIDANHADLNVKGGASFVSGEPNALQDGNGHGTHVAGTVAALNNTTGVLGVAYNADLYAVKVLSASGSGTLSGIAQGIEWSISNGMNVINMSLGGSSGSTALQQACNNAYNRGIVVIAAAGNSGSSGNRNTMGYPARYSSVIAVGAVSSNNTRASFSSVGSELEVMAPGGNILSTTPGNNYASFNGTSMAAPHVAGAAALIKAKYPSMTNVQIRERLKNTATNLGDPFFYGKGVINVESALQ

SEQ ID NO: 68986 - protein, 275 aa, Bacillus sp. LG1
AQTVPWGIPHIKADKAHAAGVTGSGVKVAILDTGIDANHADLNVKGGASFVSGEPNALQDGNGHGTHVAGTVAALNNTTGVLGVAYNADLYAVKVLSASGSGTLSGIAQGIEWSISNGMNVINMSLGGSSGSTALQQACNNAYNRGIVVIAAAGNSGSSGNRNTMGYPARYSSVIAVGAVSSNNTRASFSSVGSELEVMAPGVNILSTTPGNNYASFNGTSMAAPHVAGAAALIKAKYPSMTGVQIRERLKNTATNLGDPFFYGKGVINVESALQ

SEQ ID NO: 68987 - protein, 275 aa, Bacillus sp. LG1
AQTVPWGIPHIKADKAHAAGVTGSGVKVAILDTGIDANHADLNVKGGASFVMGEPNALQDGNGHGTHVAGTVAALNNTTGVLGVAYNADLYAVKVLSASGSGTLSGIAQGIEWSISNGMNVINMSLGGSSGSTALQQACNNAYNRGIVVIAAAGNSGSSGNRNTMGYPARYSSVIAVGAVSSNNTRASFSSVGSELEVMAPGVNILSTTPGNNYASFNGTSMAAPHVAGAAALIKAKYPSMTNVQIRERLKNTATNLGDPFFYGKGVINVESALQ

SEQ ID NO: 68988 - protein, 275 aa, Bacillus sp. LG1
AQTVPWGIPHIKADKAHAAGVTGSGVKVAILDTGIDANHADLNVKGGASFVSGEPNALQDGNGHGTHVAGTVAALNNTTGVLGVAYNADLYAVKVLSASGSGTLSGIAQGIEWSISNGMNVINMSLGGSSGSTALQQACNNAYNRGIVVIAAAGNSGSSGNRNTMGYPARYSSVIAVGAVSSNNTRASFSSVGSELEVMAPGVNILSTTPHNNYASFNGTSMAAPHVAGAAALIKAKYPSMTNVQIRERLKNTATNLGDPFFYGKGVINVESALQ

SEQ ID NO: 68989 - protein, 275 aa, Bacillus sp. LG1
AQTVPWGIPHIKADKAHAAGVTGSGVKVAYLDTGIDANHADLNVKGGASFVSGEPNALQDGNGHGTHVAGTVAALNNTTGVLGVAYNADLYAVKVLSASGSGTLSGIAQGIEWSISNGMNVINMSLGGSSGSTALQQACNNAYNRGIVVIAAAGNSGSSGNRNTMGYPARYSSVIAVGAVSSNNTRASFSSVGSELEVMAPGVNILSTTPGNNYASFNGTSMAAPHVAGAAALIKAKYPSMTNVQIRERLKNTATNLGDPFFYGKGVINVESALQ

SEQ ID NO: 68990 - protein, 275 aa, Bacillus subtilis
AQTTPWGITHINAHKAHSSSVTGSGVKVAVLDTGIDASHEDLNVKGGASFISGEPNALVDTNGHGTHVSGTVAALNNTIGVVGVAYNADLYAVKVLSASGSGTLSGIAQGVEWAIANNMDVINMSLGGSSGSTALKQAVDNAYASGIVVVAAAGNSGTRGRQNTMQYPARYSSVIAVGAVDSNNNRASFSSVGAELEVMAPGVSVLSTVPGGGYASYNGTSMASPHVAGAAALIKAKYPSLSASQIRDRLRNTATYLGDPFYYGNGVINVERALQ

SEQ ID NO: 68991 - protein, 275 aa, Bacillus sp. LG1
AQTVPWGIPHIKADKAHAAGVTGSGVKVAILDTGIDANHADLNVKGGASFVSGEPNALQDGNGHGTHVAGTVAALNNTTGVLGVAYNADLYAVKVLSASGSGTLSGIAQGIEWSISNGMNVINMSLGGSSGSTALQQACNNAYNRGIVVIAAAGNSGSSGNRNTMGYPARYSSVIAVGAVSSNNTRASFSSVGSELEVMAPGVNILSTTPGNNYASFNGTSMAAPHVAGAAALIKAKYPQMTNVQIRERLKNTATNLGDPFFYGKGVINVESALQ

SEQ ID NO: 68992 - protein, 275 aa, Bacillus sp. LG1
AQTVPWGIPHIKADKAHAAGVTGSGVKVAILDTGIDANHADLNVKGGASFVSGEPNPLQDGNGHGTHVAGTVAALNNTTGVLGVAYNADLYAVKVLSASGSGTLSGIAQGIEWSISNGMNVINMSLGGSSGSTALQQACNNAYNRGIVVIAAAGNSGSSGNRNTMGYPARYSSVIAVGAVSSNNTRASFSSVGSELEVMAPGVNILSTTPGNNYASFNGTSMAAPHVAGAAALIKAKYPSMTNVQIRERLKNTATNLGDPFFYGKGVINVESALQ

SEQ ID NO: 68993 - protein, 275 aa, Bacillus sp. LG1
AQTVPWGIPHIKADKAHAAGVTGSGVKVAILDTGIDANHADLNVKGGASFVSGEPNALQDGNGHGTHVAGTVAALNNTTGVLGVAYNADLYAVKVLSASGSGTLSGIAQGIEWSISNGMNVINMSLGGSSGSTALQQACNNAYNRGIVVIAAAGNSGSSGNRNTMGYPARYSSVIAVGAVSSNNTRASFSSVGSELEVMAPGVNILSTTPGNNYASFNGTSMAAPHVAGAAALIKNKYPSMTNVQIRERLKNTATNLGDPFFYGKGVINVESALQ

SEQ ID NO: 68994 - protein, 275 aa, Bacillus sp. LG1
AQTVPWGIPHIKADKAHAAGVTGSGVKVAILDTGIDANHADLNVKGGASFVSGEPNALQDGNGHGTHVAGTVAALNNTTGVLGVAYNADLYAVKVLSASGSGTLSGIAQGIEWSISNGMNVINMSLGGSSGSTALQQACNNAYNRGIVVIAAAGNSGSSGNRNTMGYPARYSSVIAVGAVSSNNTRASFSSVGSELEVMAPGVNILSTTPGNNYALFNGTSMAAPHVAGAAALIKAKYPSMTNVQIRERLKNTATNLGDPFFYGKGVINVESALQ

SEQ ID NO: 68995 - protein, 275 aa, Bacillus subtilis
AQVTPWGITHINAHKAHSSSVTGSGVKVAVLDTGIDASHPDLNVKGGASFISGEPNALVDTNGHGTHVSGTVAALNNTIGVVGVAYNADLYAVKVLSASGSGTLSGIAQGVEWAIANNMDVINMSLGGSSGSTALKQAVDNAYASGIVVVAAAGNSGTRGRQNTMGYPARYSSVIAVGAVDSNNQRASFSSVGAELEVMAPGVSVLSTVPGGGYASYNGTSMASPHVAGAAALIKAKYPSLSASQIRDRLRNTATYLGDPFYYGNGVINVERALQ

SEQ ID NO: 68996 - protein, 275 aa, Bacillus sp. LG1
AQTVPWGIPHIKADKAHAAGVTGSGVKVAILDTGIDANHADLNVKGGASFVSGEPNALQDGNGHGTHVAGTVAALNNTTGVLGVAYNADLYAVKVLSASGSGTLSGIAQGIEWSISNGMNVINMSLGGSSGSTALQQACWNAYNRGIVVIAAAGNSGSSGNRNTMGYPARYSSVIAVGAVSSNNTRASFSSVGSELEVMAPGVNILSTTPGNNYASFNGTSMAAPHVAGAAALIKAKYPSMTNVQIRERLKNTATNLGDPFFYGKGVINVESALQ

SEQ ID NO: 68997 - protein, 275 aa, Bacillus sp. LG1
AQTVPWGIPHIKADKAHAAGVTGSGVKVAILDTGIDANHADLNVKGGASFVSGEPNALQDGNGHGTHVAGTVAALNNTTGVLGVAYNADLYAVKVLSASGSGTLSGIAQGIEWSISNGMNVINMSLGGSSGSTALQQACNNAYNRGIVVIAAAGNSGSSGNRNTMGYPARYSSVIAVGAVSSNNTRASFSSVGSELEVMAPGVNILSTTPGNNYASFNGTSMAAPHVAGAAALIKAKYPIMTNVQIRERLKNTATNLGDPFFYGKGVINVESALQ

SEQ ID NO: 68998 - protein, 275 aa, Bacillus sp. LG1
AQTVPWGIPHIKADKAHAAGVTGSGVKVAILDTGIDANHADLNVKGGASFVSGEPNALQDGNGHGTHVAGTVAALNNTTGVLGVAMNADLYAVKVLSASGSGTLSGIAQGIEWSISNGMNVINMSLGGSSGSTALQQACNNAYNRGIVVIAAAGNSGSSGNRNTMGYPARYSSVIAVGAVSSNNTRASFSSVGSELEVMAPGVNILSTTPGNNYASFNGTSMAAPHVAGAAALIKAKYPSMTNVQIRERLKNTATNLGDPFFYGKGVINVESALQ

SEQ ID NO: 68999 - protein, 275 aa, Bacillus sp. LG1
AQTVPWGIPHIKADKASAAGVTGSGVKVAILDTGIDANHADLNVKGGASFVSGEPNALQDGNGHGTHVAGTVAALNNTTGVLGVAYNADLYAVKVLSASGSGTLSGIAQGIEWSISNGMNVINMSLGGSSGSTALQQACNNAYNRGIVVIAAAGNSGSSGNRNTMGYPARYSSVIAVGAVSSNNTRASFSSVGSELEVMAPGVNILSTTPGNNYASFNGTSMAAPHVAGAAALIKAKYPSMTNVQIRERLKNTATNLGDPFFYGKGVINVESALQ

SEQ ID NO: 69000 - protein, 275 aa, Bacillus sp. LG1
AQTVPWGIPHIKADKAHAAGVTGSGVKVAILDTGIDAQHADLNVKGGASFVSGEPNALQDGNGHGTHVAGTVAALNNTTGVLGVAYNADLYAVKVLSASGSGTLSGIAQGIEWSISNGMNVINMSLGGSSGSTALQQACNNAYNRGIVVIAAAGNSGSSGNRNTMGYPARYSSVIAVGAVSSNNTRASFSSVGSELEVMAPGVNILSTTPGNNYASFNGTSMAAPHVAGAAALIKAKYPSMTNVQIRERLKNTATNLGDPFFYGKGVINVESALQ

SEQ ID NO: 69001 - protein, 275 aa, Bacillus sp. LG1
AQTVPWGIPHIKADKAHAAGVTGSGVKVAILDTGIDANHADLNVKGGASFVSGEPNALQDGNGHGTHVAGTVAALNNTTGVLGVAYNADLYAVKVLSASGSGTLSGIAQGIEWSISNGMNVINMSLGGSSGSTALWQACNNAYNRGIVVIAAAGNSGSSGNRNTMGYPARYSSVIAVGAVSSNNTRASFSSVGSELEVMAPGVNILSTTPGNNYASFNGTSMAAPHVAGAAALIKAKYPSMTNVQIRERLKNTATNLGDPFFYGKGVINVESALQ

SEQ ID NO: 69002 - protein, 275 aa, Bacillus sp. LG1
AQTVPWGIPHIKADKAHAAGVTGSGVKVAILDTGIDANHADLNVKGGASFVTGEPNALQDGNGHGTHVAGTVAALNNTTGVLGVAYNADLYAVKVLSASGSGTLSGIAQGIEWSISNGMNVINMSLGGSSGSTALQQACNNAYNRGIVVIAAAGNSGSSGNRNTMGYPARYSSVIAVGAVSSNNTRASFSSVGSELEVMAPGVNILSTTPGNNYASFNGTSMAAPHVAGAAALIKAKYPSMTNVQIRERLKNTATNLGDPFFYGKGVINVESALQ

SEQ ID NO: 69003 - protein, 275 aa, Bacillus subtilis
AQTTPWGITHINAHKAHSSSVTGSGVKVAVLDTGIDASHPDLNVKGGASFISGEPNALVDTNGHGTHVSGTVAALNNTIGVVGVAYNADLYAVKVLSASGSGTLSGIAQGVEWAIANNMDVINMSLGGSSGSTALKQAVDNAYASGIVVVAAAGNSGTRGRQNTMGYPARYSSVIAVGAVDSNNQRASFSSVGAELEVMAPGVSVLSTVPGGGYASYSGTSMASPHVAGAAALIKAKYPSLSASQIRDRLRNTATYLGDPFYYGNGVINVERALQ

SEQ ID NO: 69004 - protein, 275 aa, Bacillus sp. LG1
AQTVPWGIPHIKADKAHAAGVTGSGVKVAILDTGIDANHADLNVKGGASFVSGEPNALQDGNGHGTHVAGTVAALNNTTGVLGVAYNADLYAVKVLSTSGSGTLSGIAQGIEWSISNGMNVINMSLGGSSGSTALQQACNNAYNRGIVVIAAAGNSGSSGNRNTMGYPARYSSVIAVGAVSSNNTRASFSSVGSELEVMAPGVNILSTTPGNNYASFNGTSMAAPHVAGAAALIKAKYPSMTNVQIRERLKNTATNLGDPFFYGKGVINVESALQ

SEQ ID NO: 69005 - protein, 275 aa, Bacillus sp. LG1
AQTVPWGIPHIKADKAHAAGVTGSGVKVAILDTGIDANHADLNVKGGASFVSGEPNALQDGNGHGTHVAGTVAALNNTTGVLGVAYNADLYAVKVLSASGSGTLSGIAQGIEWSISNGMNVINMSLGGSSGSTALQQACNNAYNRGIVVIAAAGNSGSSGNRNTMGYPARYSSVIAVGAVSSNNTRASFSSVGSELEVMAPGVNILSTTPGNNYASFNGTSMAAPHVAGAAALIKAKVPSMTNVQIRERLKNTATNLGDPFFYGKGVINVESALQ

SEQ ID NO: 69006 - protein, 275 aa, Bacillus sp. LG1
AQTVPWGIPHIKADKAHAAGVTGSGVKVAILDTGIDANHADLNVKGGASFVSGEPNALQDGNGHGTHVAGTVAALNNTTGVLGVAYNADLYAVKVLSASGSGTLSGIAQGIEWSISNGMNVINMSLGGSSGSTALQQACNNAYNRGIVVIAAAGNSGSSGNRNTMGYPARYSSVIAVGAVSSNNTRASFSSVGSELEVMAPGVNILSTTPGNNYASFNGTSMAAPHVAGAAALIKAKYPSMTNVQIRERLKNTATNLGDPFFYGKGVINVEHALQ

SEQ ID NO: 69007 - protein, 275 aa, Bacillus sp. LG1
AQTVPWGIPHIKADKAHAAGVTGSGVKVAILDTGIDANHADLNVKGGASFVSGEPNALQDGNGHGTHVAGTVAALNNTTGVLGVAYNADLYAVKVLSASGSGTLSGIAQGIEWSISNGMNVINMSLGGSSGSTALQQACNNAYNRGIVVIAAAGNSGSSGNRNTMGYPARYSSVIAVGAVSSNNTRASFSSVGSELEVMAPGVNILSTTPGNNYASFNGTSMAAPHVAGAAALIKAKYPSMTNVQIRERLKQTATNLGDPFFYGKGVINVESALQ

SEQ ID NO: 69008 - protein, 275 aa, Bacillus sp. LG1
AQTVPNGIPHIKADKAHAAGVTGSGVKVAILDTGIDANHADLNVKGGASFVSGEPNALQDGNGHGTHVAGTVAALNNTTGVLGVAYNADLYAVKVLSASGSGTLSGIAQGIEWSISNGMNVINMSLGGSSGSTALQQACNNAYNRGIVVIAAAGNSGSSGNRNTMGYPARYSSVIAVGAVSSNNTRASFSSVGSELEVMAPGVNILSTTPGNNYASFNGTSMAAPHVAGAAALIKAKYPSMTNVQIRERLKNTATNLGDPFFYGKGVINVESALQ

SEQ ID NO: 69009 - protein, 275 aa, Bacillus sp. LG1
AQTVPWGIPHIKADKAHAAGVTGSGVKVAILDTGIDANHADLNVKGGASFVSGEPNELQDGNGHGTHVAGTVAALNNTTGVLGVAYNADLYAVKVLSASGSGTLSGIAQGIEWSISNGMNVINMSLGGSSGSTALQQACNNAYNRGIVVIAAAGNSGSSGNRNTMGYPARYSSVIAVGAVSSNNTRASFSSVGSELEVMAPGVNILSTTPGNNYASFNGTSMAAPHVAGAAALIKAKYPSMTNVQIRERLKNTATNLGDPFFYGKGVINVESALQ

SEQ ID NO: 69010 - protein, 275 aa, Bacillus sp. LG1
AQTVPWGIPHIKADKAHAAGVTGSGVKVAILDTGIDANHADLNVKGGASFVSGEPNALQDGNGHGTHVAGTVAALNNTTGVLGVAYNADLYAVKVLSASGSGTLSGIAQGIEWSISNGMNVINMSLGGSSGSTALQQACNNAYNRGIVVIAAAGNSGSSGNRNTMGYPARYSSVIAVGAVSSNNTRASFSSVGPELEVMAPGVNILSTTPGNNYASFNGTSMAAPHVAGAAALIKAKYPSMTNVQIRERLKNTATNLGDPFFYGKGVINVESALQ

SEQ ID NO: 69011 - protein, 275 aa, Bacillus sp. LG1
AQTVPDGIPHIKADKAHAAGVTGSGVKVAILDTGIDANHADLNVKGGASFVSGEPNALQDGNGHGTHVAGTVAALNNTTGVLGVAYNADLYAVKVLSASGSGTLSGIAQGIEWSISNGMNVINMSLGGSSGSTALQQACNNAYNRGIVVIAAAGNSGSSGNRNTMGYPARYSSVIAVGAVSSNNTRASFSSVGSELEVMAPGVNILSTTPGNNYASFNGTSMAAPHVAGAAALIKAKYPSMTNVQIRERLKNTATNLGDPFFYGKGVINVESALQ

SEQ ID NO: 69012 - protein, 275 aa, Bacillus sp. LG1
AQTVPWGIPHIKADKAHAAGVTGSGVKVAILDTGIDANHADLNVKGGASFVHGEPNALQDGNGHGTHVAGTVAALNNTTGVLGVAYNADLYAVKVLSASGSGTLSGIAQGIEWSISNGMNVINMSLGGSSGSTALQQACNNAYNRGIVVIAAAGNSGSSGNRNTMGYPARYSSVIAVGAVSSNNTRASFSSVGSELEVMAPGVNILSTTPGNNYASFNGTSMAAPHVAGAAALIKAKYPSMTNVQIRERLKNTATNLGDPFFYGKGVINVESALQ

SEQ ID NO: 69013 - protein, 275 aa, Bacillus sp. LG1
AQTVPWGIPHIKADKAHAAGVTGSGVKVAILDTGIDANHADLNVKGGASFVSGEPNALQDGNGHGTHVAGTVAALNNTTGVLGVAYNADLYAVKVLSASGSGTLSGIAQGIEWSISNGMNVINMSLGGSSGSTALQQACNNAYNRGIVVIAAAGNSGSSGNRNTMGYPARYSSVIAVGAVSSNNTRASFSSVGSELEVMAPGVNILSTTPGNNYASFNGTSMAAPHVAGAAALIKAKYPSMTNVQIRERLKNTATNLGDPFFYGKGVINVEKALQ

SEQ ID NO: 69014 - protein, 275 aa, Bacillus sp. LG1
AQTVPWGIPHIKADKALAAGVTGSGVKVAILDTGIDANHADLNVKGGASFVSGEPNALQDGNGHGTHVAGTVAALNNTTGVLGVAYNADLYAVKVLSASGSGTLSGIAQGIEWSISNGMNVINMSLGGSSGSTALQQACNNAYNRGIVVIAAAGNSGSSGNRNTMGYPARYSSVIAVGAVSSNNTRASFSSVGSELEVMAPGVNILSTTPGNNYASFNGTSMAAPHVAGAAALIKAKYPSMTNVQIRERLKNTATNLGDPFFYGKGVINVESALQ

SEQ ID NO: 69015 - protein, 275 aa, Bacillus sp. LG1
AQTVPWGIPHIKADKAHAAGVTGSGVKVAILDTGIDANHADLNVKGGASFVSGEPNALQDGNGHGTHVAGTVAALNNTTGVLGVAYNADLYAVKVLSASGSGTLSGIAQGIEWSISNGMNVINMSLGGSSGSTALQQACNNAYNRGIVVIAAAGNSGSSGNRNTMGYPARYSSVIAVGAVSSNNTRASFSSVGSELEVMAPGVNILSTTPGNNYASFNGTSMAAPHVAGAAALIKAKYPSMINVQIRERLKNTATNLGDPFFYGKGVINVESALQ

SEQ ID NO: 69016 - protein, 275 aa, Bacillus sp. LG1
AQTVPWGIPHIKADKAHAAGVTGSGVKVAILDTGIDANHADLNVKGGASFVSGEPNALQDGNGHGTHVAGTVAALNNTTGVLGVAYNADLYAVKVLSLSGSGTLSGIAQGIEWSISNGMNVINMSLGGSSGSTALQQACNNAYNRGIVVIAAAGNSGSSGNRNTMGYPARYSSVIAVGAVSSNNTRASFSSVGSELEVMAPGVNILSTTPGNNYASFNGTSMAAPHVAGAAALIKAKYPSMTNVQIRERLKNTATNLGDPFFYGKGVINVESALQ

SEQ ID NO: 69017 - protein, 275 aa, Bacillus sp. LG1
AQTVPWGIPHIKADKAHAAGVTGSGVKVAILDTGIDANHADLNVKGGASFVSGEPNALQDGNGHGTHVAGTVAALNNTTGVLGVAYNADLYAVKVLSASGSGTLSGIAQGIEWSISNGMNVINMSLGGSSGSTALQQACNNAYNRGIVVIAAAGNSGSSGNRNTMGYPARYSSVIAVGAVSSNNTRASFSSVGSELEVMAPGVNILSTTPGNNYASFNGTSMAAPHVAGAAALIFAKYPSMTNVQIRERLKNTATNLGDPFFYGKGVINVESALQ

SEQ ID NO: 69018 - protein, 275 aa, Bacillus sp. LG1
AQTVPWGIPHIKADKAHAAGVTGSGVKVAILDTGIDANHADLNVKGGASFVSGEPNALQDGNGHGTHVAGTVAALNNTTGVLGVAYNADLYAVKVLSASGSGTLSGIAQGIEWSISNGMNVINMSLGGDSGSTALQQACNNAYNRGIVVIAAAGNSGSSGNRNTMGYPARYSSVIAVGAVSSNNTRASFSSVGSELEVMAPGVNILSTTPGNNYASFNGTSMAAPHVAGAAALIKAKYPSMTNVQIRERLKNTATNLGDPFFYGKGVINVESALQ

SEQ ID NO: 69019 - protein, 275 aa, Bacillus sp. LG1
AQTVPWGIPHIKADKAHAAGVTGSGVKVAILDTGIDANHADLNVKGGASFVSGEPNALQDGNGHGTHVAGTVAALNNTTGVLGVAYNADLYAVKVLSASGSGTLSGIAQGIEWSISNGMNVINMSLGGSSGSTALQQACNNAYNRGIVVIAAAGNSGSSGNRNTMGYPARYSSVIAVGAVSSNNTRASFSSVGSELEVMAPGVNILSTTPGNDYASFNGTSMAAPHVAGAAALIKAKYPSMTNVQIRERLKNTATNLGDPFFYGKGVINVESALQ

SEQ ID NO: 69020 - protein, 275 aa, Bacillus sp. LG1
AQTVPWGIPHIKADKAHAAGVTGSGVKVAILDTGIDAKHADLNVKGGASFVSGEPNALQDGNGHGTHVAGTVAALNNTTGVLGVAYNADLYAVKVLSASGSGTLSGIAQGIEWSISNGMNVINMSLGGSSGSTALQQACNNAYNRGIVVIAAAGNSGSSGNRNTMGYPARYSSVIAVGAVSSNNTRASFSSVGSELEVMAPGVNILSTTPGNNYASFNGTSMAAPHVAGAAALIKAKYPSMTNVQIRERLKNTATNLGDPFFYGKGVINVESALQ

SEQ ID NO: 69021 - protein, 275 aa, Bacillus sp. LG1
AQTVPWGIPHIKADKAHAAGVTGSGVKVAILDTGIDANHADLNVKGGASFVSGEPNALQDGNGHGTHVAGTVAALNNTTGVLGVAYNADLYAVKVLSASGSGTLSGIAQGIEWSISNGMNVINMSLGGSSGSTALQQACNNAYNRGIVVIAAAGNSGSSGNRNTMGYPARYSSVIAVGAVSSNNTRASFSSVGSELEVMAPGVNILSTTPGNNYASFNGTSMAAPHVAGAAALIKAKQPSMTNVQIRERLKNTATNLGDPFFYGKGVINVESALQ

SEQ ID NO: 69022 - protein, 275 aa, Bacillus sp. LG1
AQTVPWGIPHIKADKAHAAGVTGSGVKVAILDTGIDANHADLNVKGGASFVSGEPNALQDGNGHGTHVAGTVAALNNTTGVLGVAYNADLYAVKVLSASGSGTLSGIAQGIEWSISNGMNVINMSLGGSSGSTALRQACNNAYNRGIVVIAAAGNSGSSGNRNTMGYPARYSSVIAVGAVSSNNTRASFSSVGSELEVMAPGVNILSTTPGNNYASFNGTSMAAPHVAGAAALIKAKYPSMTNVQIRERLKNTATNLGDPFFYGKGVINVESALQ

SEQ ID NO: 69023 - protein, 275 aa, Bacillus sp.
AQTVPWGIPHIKADKAHAAGVTGSGVKVAILDTGIDANHADLNVKGGASFVSGEPNALQDGNGHGTHVAGTVAALDNTTGVLGVAYNADLYAVKVLSASGSGTLSGIAQGIEWSISNGMNVINMSLGGSSGSTALQQACNNAYNRGIVVIAAAGNSGSSGNRNTMDYPARYSSVIAVGAVSSNNTRASFSSVGSELEVMAPGVNILSTTPGNNYASFNGTSMAAPHVAGAAALIKAKYPSMTNVQIRERLKNTATNLGDPFFYGKGVINVEKALQ

SEQ ID NO: 69024 - protein, 275 aa, Bacillus sp. LG1
AQTVPSGIPHIKADKAHAAGVTGSGVKVAILDTGIDANHADLNVKGGASFVSGEPNALQDGNGHGTHVAGTVAALNNTTGVLGVAYNADLYAVKVLSASGSGTLSGIAQGIEWSISNGMNVINMSLGGSSGSTALQQACNNAYNRGIVVIAAAGNSGSSGNRNTMGYPARYSSVIAVGAVSSNNTRASFSSVGSELEVMAPGVNILSTTPGNNYASFNGTSMAAPHVAGAAALIKAKYPSMTNVQIRERLKNTATNLGDPFFYGKGVINVESALQ

SEQ ID NO: 69025 - protein, 275 aa, Bacillus sp. LG1
AQTVPWGIPHIKADKAHAAGVTGSGVKVAILDTGIDANHADLNVKGGASFVSGEPSALQDGNGHGTHVAGTVAALNNTTGVLGVAYNADLYAVKVLSASGSGTLSGIAQGIEWSISNGMNVINMSLGGSSGSTALQQACNNAYNRGIVVIAAAGNSGSSGNRNTMGYPARYSSVIAVGAVSSNNTRASFSSVGSELEVMAPGVNILSTTPGNNYASFNGTSMAAPHVAGAAALIKAKYPSMTNVQIRERLKNTATNLGDPFFYGKGVINVESALQ

SEQ ID NO: 69026 - protein, 275 aa, Bacillus sp. LG1
AQTVPWGIPHIKADKAHAAGVTGSGVKVAILDTGIDANHADLNVKGGASFVSGEPNALQDGNGHGTHVAGTVAALNNTTGVLGVAYNQDLYAVKVLSASGSGTLSGIAQGIEWSISNGMNVINMSLGGSSGSTALQQACNNAYNRGIVVIAAAGNSGSSGNRNTMGYPARYSSVIAVGAVSSNNTRASFSSVGSELEVMAPGVNILSTTPGNNYASFNGTSMAAPHVAGAAALIKAKYPSMTNVQIRERLKNTATNLGDPFFYGKGVINVESALQ

SEQ ID NO: 69027 - protein, 275 aa, Bacillus sp. LG1
AQTVPWGIPHIKADKAHAAGVTGSGVKVAILDTGIDANHADLNVKGGASFVSGEPNALQDGNGHGTHVAGTVAALNNTTGVLGVAYNADLYAVKVLSASGSGTLSGIAQGIEWSISNGMNVINMSLGGSSGSTALQQACNNAYNRGIVVIAAAGNSGSSGNRNTMGYPARYSSVIAVGAVSSNNTRASFSSVGSELEVMAPGVNALSTTPGNNYASFNGTSMAAPHVAGAAALIKAKYPSMTNVQIRERLKNTATNLGDPFFYGKGVINVESALQ

SEQ ID NO: 69028 - protein, 275 aa, Bacillus sp. LG1
AQTVPWGIPHIKADKAHAAGVTGSGVKVAILDTGIDANHADLNVKGGASFVSGEPNALQDGNGHGTHVAGTVAALNNTTGVLGVAYNADLYAVKVLSASGSGTLSGIAQGIEWSISNGMNVINMSLGGSSGSTALQQACNNAYNRGIVVIAAAGNSGSSGNRNTMGYPARYSSVIAVGAVSSNNTRASFSSVGSELEVMAPGVNILSTTPKNNYASFNGTSMAAPHVAGAAALIKAKYPSMTNVQIRERLKNTATNLGDPFFYGKGVINVESALQ

SEQ ID NO: 69029 - protein, 275 aa, Bacillus sp. LG1
AQTVPWGIPHIKADKAHAAGVTGSGVKVAILDTGIDANHADLNVKGGASFVSGEPNALQDGNGHGTHVAGTVAALNNTTGVLGVAYNADLYAVKVLSASGSGTLSGIAQGIEWSISNGMNVINMSLGGSSGSTALQQACNNAYNRGIVVIAAAGNSGSSGNRNTMGYPARYSSVIAVGAVSSNNTRASFSSVGSELEVMAPGVNILSTTPGNNYASFNGTSMAAPHVAGAAALIKAKYPSMTNFQIRERLKNTATNLGDPFFYGKGVINVESALQ

SEQ ID NO: 69030 - protein, 275 aa, Bacillus sp. LG1
AQTVPWGIPHIKADKAHAMGVTGSGVKVAILDTGIDANHADLNVKGGASFVSGEPNALQDGNGHGTHVAGTVAALNNTTGVLGVAYNADLYAVKVLSASGSGTLSGIAQGIEWSISNGMNVINMSLGGSSGSTALQQACNNAYNRGIVVIAAAGNSGSSGNRNTMGYPARYSSVIAVGAVSSNNTRASFSSVGSELEVMAPGVNILSTTPGNNYASFNGTSMAAPHVAGAAALIKAKYPSMTNVQIRERLKNTATNLGDPFFYGKGVINVESALQ

SEQ ID NO: 69031 - protein, 275 aa, Bacillus sp. LG1
AQTVPWGIPHIKADKAHAAGDTGSGVKVAILDTGIDANHADLNVKGGASFVSGEPNALQDGNGHGTHVAGTVAALNNTTGVLGVAYNADLYAVKVLSASGSGTLSGIAQGIEWSISNGMNVINMSLGGSSGSTALQQACNNAYNRGIVVIAAAGNSGSSGNRNTMGYPARYSSVIAVGAVSSNNTRASFSSVGSELEVMAPGVNILSTTPGNNYASFNGTSMAAPHVAGAAALIKAKYPSMTNVQIRERLKNTATNLGDPFFYGKGVINVESALQ

SEQ ID NO: 69032 - protein, 275 aa, Bacillus sp. LG1
AQTVPWGIPHIKADKAHAAGVTGSGVKVAILDTGIDANHADLNVKGGASFVSGEPNCLQDGNGHGTHVAGTVAALNNTTGVLGVAYNADLYAVKVLSASGSGTLSGIAQGIEWSISNGMNVINMSLGGSSGSTALQQACNNAYNRGIVVIAAAGNSGSSGNRNTMGYPARYSSVIAVGAVSSNNTRASFSSVGSELEVMAPGVNILSTTPGNNYASFNGTSMAAPHVAGAAALIKAKYPSMTNVQIRERLKNTATNLGDPFFYGKGVINVESALQ

SEQ ID NO: 69033 - protein, 275 aa, Bacillus sp. LG1
AQTVPWGIPHIKADKAHAAGVTGSGVKVAILDTGIDANHADLNVKGGASFVSGEPNALQDGNGHGTHVAGTVAALNNTTGVLGVAYNADLYAVKVLSASGSGTLSGIAQGIEWSISNGMNVINMSLGGSSGSTALQQACNNAYNRGIVVIAAAGNSGSSGNRNTMGYPARYSSVIAVGAVSSNNTRASFSSVGSELEVMAPGVNILSTTPGNNYASFNGTSMAAPHVAGAAALIKAKYPSMTNVQIRERLKNTATNLGDNFFYGKGVINVESALQ

SEQ ID NO: 69034 - protein, 275 aa, Bacillus sp. LG1
AQTVPWGIPHIKADKAHAAGVTGSGVKVAILDTGIDANHADLNVKGGASFVSGEPNARQDGNGHGTHVAGTVAALNNTTGVLGVAYNADLYAVKVLSASGSGTLSGIAQGIEWSISNGMNVINMSLGGSSGSTALQQACNNAYNRGIVVIAAAGNSGSSGNRNTMGYPARYSSVIAVGAVSSNNTRASFSSVGSELEVMAPGVNILSTTPGNNYASFNGTSMAAPHVAGAAALIKAKYPSMTNVQIRERLKNTATNLGDPFFYGKGVINVESALQ

SEQ ID NO: 69035 - protein, 275 aa, Bacillus sp. LG1
AQTVPWGIPHIKADKAHAAGVTGSGVKVAILDTGIDANHADLNVKGGASFVSGEPNALIDGNGHGTHVAGTVAALNNTTGVLGVAYNADLYAVKVLSASGSGTLSGIAQGIEWSISNGMNVINMSLGGSSGSTALQQACNNAYNRGIVVIAAAGNSGSSGNRNTMGYPARYSSVIAVGAVSSNNTRASFSSVGSELEVMAPGVNILSTTPGNNYASFNGTSMAAPHVAGAAALIKAKYPSMTNVQIRERLKNTATNLGDPFFYGKGVINVESALQ

SEQ ID NO: 69036 - protein, 275 aa, Bacillus sp. LG1
AQTVPWGIPHIKADKAHAAGVTGSGVKVAILDTGIDANHADLNVKGGASFVSGEPNALQDGNGHGTHVAGTVAALNNTTGVLGVAYNADLYAVKVLSASGSGTLSGIAQGIEWSISNGMNVINMSLGGSSGSTALQQACNNAYNRGIVVIAAAGNSGSSGNRNTMGYPARYSSVIAVGAVSSNNTRASFSSVGSELEVMAPGVNILSTTPGNNYASFNGTSMAAPHVAGAAALIKAKYPSMTNVQCRERLKNTATNLGDPFFYGKGVINVESALQ

SEQ ID NO: 69037 - protein, 275 aa, Bacillus sp. LG1
AQTVPWGIPHIKADKAHAFGVTGSGVKVAILDTGIDANHADLNVKGGASFVSGEPNALQDGNGHGTHVAGTVAALNNTTGVLGVAYNADLYAVKVLSASGSGTLSGIAQGIEWSISNGMNVINMSLGGSSGSTALQQACNNAYNRGIVVIAAAGNSGSSGNRNTMGYPARYSSVIAVGAVSSNNTRASFSSVGSELEVMAPGVNILSTTPGNNYASFNGTSMAAPHVAGAAALIKAKYPSMTNVQIRERLKNTATNLGDPFFYGKGVINVESALQ

SEQ ID NO: 69038 - protein, 275 aa, Bacillus sp. LG1
AQTVPWGIPHIKADKAHAAGVTGSGVKVAILDTGIDANHADLNVKGGASFVSGEPNALQDGNGHGTHVAGTVAALNNTTGVLGVAYNADLYAVKVLKASGSGTLSGIAQGIEWSISNGMNVINMSLGGSSGSTALQQACNNAYNRGIVVIAAAGNSGSSGNRNTMGYPARYSSVIAVGAVSSNNTRASFSSVGSELEVMAPGVNILSTTPGNNYASFNGTSMAAPHVAGAAALIKAKYPSMTNVQIRERLKNTATNLGDPFFYGKGVINVESALQ

SEQ ID NO: 69039 - protein, 275 aa, Bacillus sp. LG1
AQTVPWGIPHIKADKAHAAGVTGSGVKVAILDTGIDANHADLNVKGGASFVSGEPNALQDGNGHGTHVAGTVAALNNTTGVLGVAYNADLYAVKVLSASGSGTLSGIAQGIEWSISNGMNVINMSLGGSSGSTALQQACNNAYNRGIVVIAAAGNSGSSGNRNTMGYPARYSSVIAVGAVSSNNTRASFSSVGSELEVMAPGVNILSTTPGNNYASFNGTSMAAPHVAGAAALIKAKFPSMTNVQIRERLKNTATNLGDPFFYGKGVINVESALQ

SEQ ID NO: 69040 - protein, 275 aa, Bacillus sp. LG1
AQTVPWGIPHIKADKAHAAGVTGSGVKVAILDTGIDANHADLNVKGGASFVSGEPNALQDGNGHGTHVAGTVAALNNTTGVLGVAYNADLYAVKVLSASGSGTLSGIAQGIEWLISNGMNVINMSLGGSSGSTALQQACNNAYNRGIVVIAAAGNSGSSGNRNTMGYPARYSSVIAVGAVSSNNTRASFSSVGSELEVMAPGVNILSTTPGNNYASFNGTSMAAPHVAGAAALIKAKYPSMTNVQIRERLKNTATNLGDPFFYGKGVINVESALQ

SEQ ID NO: 69041 - protein, 275 aa, Bacillus sp. LG1
AQTVPWGIPHIKADKAHAAGVTGSGVKVAILDTGIDANHADLNVKGGASFVSGEPNALQDGNGHGTHVAGTVAALNNTTGVLGVAYNADLYAVKVLSASGSGTLSGIAQGIEWSISNGMNVINMSLGGSSGSTALQQACNNAYNRGIVVIAAAGNSGSSGNRNTMGYPARYSSVIAVGAVSSNNTRASFSSVGSELEVMAPGVNILSTTPGNNYASFNGTSMAAPHVAGAAALIKAKYPSMTNVQIRERLLNTATNLGDPFFYGKGVINVESALQ

SEQ ID NO: 69042 - protein, 275 aa, Bacillus subtilis
AQVTPWGIEHINAHKAHSSSVTGSGVKVAVLDTGIDASHEDLNVKGGASFISGEPNALVDTNGHGTHVAGTVAALNNTIGVVGVAYNADLYAVKVLSASGSGTLSGIAQGVEWAIANNMDVINMSLGGSSGSTALKQAVDNAYASGIVVVAAAGNSGTRGRQNTMGYPARYSSVIAVGAVDSNNQRASFSSVGAELEVMAPGVSVLSTVPGGGYASYNGTSMASPHVAGAAALIKAKYPSLSASQIRDRLRNTATYLGDPFYYGNGVINVERALQ

SEQ ID NO: 69043 - protein, 275 aa, Bacillus sp. LG1
AQTVPWGIPHIKADKAHAAGVTGSGVKVAILDTGIDANHADLNVKGGASFVSGEPNALQDGNGHGTHVAGTVAALNNTTGVLGVAYNADLYAVKVLSASGSGTLSGIAQGIEWSISNGMNVINMSLGGSSGSTALQQACNNAYNRGIVVIAAAGNSGSSGNRNTMGYPARYSSVIAVGAVSSNNTRASFSSVGKELEVMAPGVNILSTTPGNNYASFNGTSMAAPHVAGAAALIKAKYPSMTNVQIRERLKNTATNLGDPFFYGKGVINVESALQ

SEQ ID NO: 69044 - protein, 275 aa, Bacillus sp. LG1
AQTVPWGIPHIKADKAHAAGVTGSGVKVAILDTGIDANHADLNVKGGASFVSGEPNALQDGNGHGTHVAGTVAALNNTTGVLGVAYNADLYAVKVLSASGSGTLSGIAQGIEWSISNGMNVINMSLGGSSGSTALQQACNNAYNRGIVVIAAAGNSGSSGNRNTMGYPAMYSSVIAVGAVSSNNTRASFSSVGSELEVMAPGVNILSTTPGNNYASFNGTSMAAPHVAGAAALIKAKYPSMTNVQIRERLKNTATNLGDPFFYGKGVINVESALQ

SEQ ID NO: 69045 - protein, 275 aa, Bacillus sp. LG1
AQTVPWGIPHIKADKAHAAGVTGSGVKVAILDTGIDANHADLNVKGGASFVSGEPNALQDGNGHGTHVAGTVAALNNTTGVLGVAYNADLYAVKVLSASGSGTLSGIAQGIEWSISNGMNVINMSLGGSSGSTALQQACNNAYNRGIVVIAAAGNSGSSGNRNTMGYPARYSSVIAVGAVSSNNTRASFSSVGSELEVMAPGVNILSTTPGNNYASFNGTSMAAPHVAGAAALIKAKYPSMTNVQFRERLKNTATNLGDPFFYGKGVINVESALQ

SEQ ID NO: 69046 - protein, 275 aa, Bacillus sp. LG1
AQTVPWGIPHIKADKAHAAGVTGSGVKVAILDTGIDATHADLNVKGGASFVSGEPNALQDGNGHGTHVAGTVAALNNTTGVLGVAYNADLYAVKVLSASGSGTLSGIAQGIEWSISNGMNVINMSLGGSSGSTALQQACNNAYNRGIVVIAAAGNSGSSGNRNTMGYPARYSSVIAVGAVSSNNTRASFSSVGSELEVMAPGVNILSTTPGNNYASFNGTSMAAPHVAGAAALIKAKYPSMTNVQIRERLKNTATNLGDPFFYGKGVINVESALQ

SEQ ID NO: 69047 - protein, 275 aa, Bacillus sp. LG1
AQTVPWGIPHIKADKAHAAGVTGSGVKVAILDTGIDANHADLNVKGGASFVSGEPNALQDGNGHGTHVAGTVAALNNTTGVLGVAYNADLYAVKVLSASGSGTLSGIAQGIEWSISNGMNVINMSLGGSSGSTALQQACNNAYNRGIVVIAAAGNSGSSGNRNTMGYPARYSSVIAVGAVSSNNGRASFSSVGSELEVMAPGVNILSTTPGNNYASFNGTSMAAPHVAGAAALIKAKYPSMTNVQIRERLKNTATNLGDPFFYGKGVINVESALQ

SEQ ID NO: 69048 - protein, 275 aa, Bacillus sp. LG1
AQTVPWGIPHIKADKAHAAGVTGSGVKVAILDTGIDANHADLNVFGGASFVSGEPNALQDGNGHGTHVAGTVAALNNTTGVLGVAYNADLYAVKVLSASGSGTLSGIAQGIEWSISNGMNVINMSLGGSSGSTALQQACNNAYNRGIVVIAAAGNSGSSGNRNTMGYPARYSSVIAVGAVSSNNTRASFSSVGSELEVMAPGVNILSTTPGNNYASFNGTSMAAPHVAGAAALIKAKYPSMTNVQIRERLKNTATNLGDPFFYGKGVINVESALQ

SEQ ID NO: 69049 - protein, 275 aa, Bacillus sp. LG1
AQTVPWGIPHIKADKAHAAGVTGSGVKVAILDTGIDANHADLNVKGGASFVSGEPNALQDGNGHGTHVAGTVAALNNTTGVLGVAYNADLYAVKVLSASGSGTLSGIAQGIEWSISNGMNVINMSLGGSSGSTALQQACNNAYNRGIVVIAAAGNSGSSGNRNTMGYPARYSSVIAVGAVSSNNTRASFSSVGSELEVMAPGVNILSTTPGNNYASFNGTSMAAPHVAGAAALIKAKYPSMTNVQIRERLKNTATNLGDPFFYGKGVINVESAEQ

SEQ ID NO: 69050 - protein, 275 aa, Bacillus sp. LG1
AQTVPWGIPHIKADKAHAAGVTGSGVKVAILDTGIDANHTDLNVKGGASFVSGEPNALQDGNGHGTHVAGTVAALNNTTGVLGVAYNADLYAVKVLSASGSGTLSGIAQGIEWSISNGMNVINMSLGGSSGSTALQQACNNAYNRGIVVIAAAGNSGSSGNRNTMGYPARYSSVIAVGAVSSNNTRASFSSVGSELEVMAPGVNILSTTPGNNYASFNGTSMAAPHVAGAAALIKAKYPSMTNVQIRERLKNTATNLGDPFFYGKGVINVESALQ

SEQ ID NO: 69051 - protein, 275 aa, Bacillus sp. LG1
AQTVPWGIPHIKADKAHAAGVTGSGVKVAILDTGIDANHADLNVKGGASFVSGEPNALQDGNGHGTHVAGTVAALNNTTGVLGVAYNADLYAVKVLSASGSGTLSGIAQGIEWSISNGMNVINMSLGGSSGSTALQQACGNAYNRGIVVIAAAGNSGSSGNRNTMGYPARYSSVIAVGAVSSNNTRASFSSVGSELEVMAPGVNILSTTPGNNYASFNGTSMAAPHVAGAAALIKAKYPSMTNVQIRERLKNTATNLGDPFFYGKGVINVESALQ

SEQ ID NO: 69052 - protein, 275 aa, Bacillus sp. LG1
AQTVPWGIPHIKADKAHAAGVTGSGVKVAILDTGIDANHADLNVKGGASFVNGEPNALQDGNGHGTHVAGTVAALNNTTGVLGVAYNADLYAVKVLSASGSGTLSGIAQGIEWSISNGMNVINMSLGGSSGSTALQQACNNAYNRGIVVIAAAGNSGSSGNRNTMGYPARYSSVIAVGAVSSNNTRASFSSVGSELEVMAPGVNILSTTPGNNYASFNGTSMAAPHVAGAAALIKAKYPSMTNVQIRERLKNTATNLGDPFFYGKGVINVESALQ

SEQ ID NO: 69053 - protein, 275 aa, Bacillus subtilis
AQVTPWGITHINAHKAHSSSVTGSGVKVAVLDTGIDASHEDLNVKGGASFISGEPNALVDTNGHGTHVAGTVAALNNTIGVVGVAYNADLYAVKVLSASGSGTLSGIAQGVEWAIANNMDVINMSLGGSSGSTALKQAVDNAYASGIVVVAAAGNSGTRGRQNTMQYPARYSSVIAVGAVDSNNNRASFSSVGAELEVMAPGVSVLSTVPGGGYASYNGTSMASPHVAGAAALIKAKYPSLSASQIRDRLRNTATYLGPPFYYGNGVINVERALQ

SEQ ID NO: 69054 - protein, 275 aa, Bacillus sp. LG1
AQTVPWGIPHIKADKAHAAGVTGSGVKVAILDTGIDAEHADLNVKGGASFVSGEPNALQDGNGHGTHVAGTVAALNNTTGVLGVAYNADLYAVKVLSASGSGTLSGIAQGIEWSISNGMNVINMSLGGSSGSTALQQACNNAYNRGIVVIAAAGNSGSSGNRNTMGYPARYSSVIAVGAVSSNNTRASFSSVGSELEVMAPGVNILSTTPGNNYASFNGTSMAAPHVAGAAALIKAKYPSMTNVQIRERLKNTATNLGDPFFYGKGVINVESALQ

SEQ ID NO: 69055 - protein, 275 aa, Bacillus sp. LG1
AQTVPWGIPHIKADKAHAAGVTGSGVKVAILDTGIDANHADLNVKGGASFVSGEPNALQDGNGHGTHVAGTVAALNNTTGVLGVAYNADLYAVKVLSASGSGTLSGIAQGIEWSISNGMNVINMSLGGSSGSTALQQACNNAYNRGIVVIAAAGNSGSSGNRNTMGYPARYSSVIAVGAVSSNNTRASFSSVGSELEVMAPGVNILSTTPGNNYASFNGTSMAAPHVAGAAALIKAKYPSMTNVQIRERLVNTATNLGDPFFYGKGVINVESALQ

SEQ ID NO: 69056 - protein, 275 aa, Bacillus subtilis
AQTTPWGITHINAHKAHSSSVTGSGVKVAVLDTGIDASHPDLNVKGGASFISGEPNALVDTNGHGTHVAGTVAALNNNIGVVGVAYNADLYAVKVLSASGSGTLSGIAQGVEWAIANNMDVINMSLGGSSGSTALKQAVDNAYASGIVVVAAAGNSGTRGRQNTMQYPARYSSVIAVGAVDSNNNRASFSSVGAELEVMAPGVSVLSTVPGGGYASYSGTSMASPHVAGAAALIKAKYPSLSASQIRDRLRNTATYLGDPFYYGNGVINVERALQ

SEQ ID NO: 69057 - protein, 275 aa, Bacillus sp. LG1
AQTVPWGIPHIKADKAHAAGVTGSGVKVAILDTGIDANHADLNVKGGASFVSGEPNALQDGNGHGTHVAGTVAALNNTTGVLGVAYNADLYAVKVLSASGSGTLSGIAQGIEWSISNGMNVINMSLGGSSGSTALQQACNNAYNRGIVVIAAAGNSGSSGNRNTMGYPARYSSVIAVGAVSSNNTRASFSSVGSELEVMAPGVNILSTTPGNNYASFNGTSMAAPHVAGAAALIKAKYPSMTNVQIRERLRNTATNLGDPFFYGKGVINVESALQ

SEQ ID NO: 69058 - protein, 275 aa, Bacillus sp. LG1
AQTVPWGIPHIKADKAHAAGVTGSGVKVAILDTGIWANHADLNVKGGASFVSGEPNALQDGNGHGTHVAGTVAALNNTTGVLGVAYNADLYAVKVLSASGSGTLSGIAQGIEWSISNGMNVINMSLGGSSGSTALQQACNNAYNRGIVVIAAAGNSGSSGNRNTMGYPARYSSVIAVGAVSSNNTRASFSSVGSELEVMAPGVNILSTTPGNNYASFNGTSMAAPHVAGAAALIKAKYPSMTNVQIRERLKNTATNLGDPFFYGKGVINVESALQ

SEQ ID NO: 69059 - protein, 275 aa, Bacillus sp. LG1
AQTVPWGIPHIKADKAHAAGVTGSGVKVAILDTGIDANHADLNVKGGASFVSGEPNALQDGNGHGTHVAGTVAALNNTTGVLGVAYNADLYAVKVLSASGSGTLSGIAQGIEWSISNGMNVINMSLGGSSGSTALQQACNNAYNRGIVVIAAAGNSGSSGNRNTMGYPARYSSVIAVGAVSSNNTRASFSSVGSELEVMAPGVNILSTTPGNNYADFNGTSMAAPHVAGAAALIKAKYPSMTNVQIRERLKNTATNLGDPFFYGKGVINVESALQ

SEQ ID NO: 69060 - protein, 275 aa, Bacillus sp.
AQTVPWGIPHIKADKAHAAGVTGSGVKVAILDTGIDANHADLNVKGGASFVSGEPNALQDGNGHGTHVAGTVAALDNTTGVLGVAYNADLYAVKVLSASGSGTLSGIAQGIEWSISNGMNVINMSLGGSSGSTALQQACNNAYNRGIVVIAAAGNSGSSGNRNTMDYPARYSSVIAVGAVSSNNTRASFSSVGSELEVMAPGVNILSTTPGNNYASFNGTSMAAPHVAGAAALIKAKYPSMTNVQIRERLKNTATRLGDPFFYGKGVINVESALQ

SEQ ID NO: 69061 - protein, 275 aa, Bacillus sp. LG1
AQTVPWGIPHIKADKAHAAGVTGSGVKVAILDTGIDANHADLNVKGGASFVSGEPNALQDGNGHGTHVAGTVAALNNTTGVLGVAYNADLYAVKVLSASGSGTLSGIAQGIEWSISNGMNVINMSLGGSSGSTALQQACNNAYNRGIVVIAAAGNSGSSGNRNTMGYPARYSSVIAVGAVSSNNTRASFSSVGSELEVMAPGVNILSTTPGNNYASFNGTSMAAPHVAGAAALIKAKYPSMTNQQIRERLKNTATNLGDPFFYGKGVINVESALQ

SEQ ID NO: 69062 - protein, 275 aa, Bacillus sp. LG1
AQTVPAGIPHIKADKAHAAGVTGSGVKVAILDTGIDANHADLNVKGGASFVSGEPNALQDGNGHGTHVAGTVAALNNTTGVLGVAYNADLYAVKVLSASGSGTLSGIAQGIEWSISNGMNVINMSLGGSSGSTALQQACNNAYNRGIVVIAAAGNSGSSGNRNTMGYPARYSSVIAVGAVSSNNTRASFSSVGSELEVMAPGVNILSTTPGNNYASFNGTSMAAPHVAGAAALIKAKYPSMTNVQIRERLKNTATNLGDPFFYGKGVINVESALQ

SEQ ID NO: 69063 - protein, 275 aa, Bacillus sp. LG1
AQTVPWGIPHIKADKAHAAGVTGSGVKVAILDTGIDANHADLNVKGGASFVSGEPNALQDGNGHGTHVAGTVAALNNTTGVLGVAYNADLYAVKVLSASGSGTLSGIAQGIEWSISNGMNVINMSLGGSSGSTALQQACNNAYNRGIVVIAAAGNSGSSGNRNTMGYPARYSSVIAVGAVSSNNTRASFSSVGSELEVMAPGVNILSTTPGNNYASFNGTSMAAPHVAGAAALIKAKKPSMTNVQIRERLKNTATNLGDPFFYGKGVINVESALQ

SEQ ID NO: 69064 - protein, 275 aa, Bacillus sp. LG1
AQTVPWGIPHIKADKAHAAGVTGSGVKVAILDTGIDANHADLNVKGGASFVSGEPNALQDGNGHGTHVAGTVAALNNTTGVLGVAYNADLYAVKVLSASGSGTLSGIAQGIEWSISNGMNVINMSLGGSSGSTALQQACNNAYNRGIVVIAAAGNSGSSGNRNTMGYPARYSSVIAVGAVSSNNTRASFSSVGSELEVMAPGVNILSTTPGNNYASFNGTSMAAPHVAGAAALIKAKYPSMTNVQIRERLKNTATPLGDPFFYGKGVINVESALQ

SEQ ID NO: 69065 - protein, 275 aa, Bacillus sp. LG1
AQTVPWGIPHIKADKAHAAGVTGSGVKVAILDTGIDANHADLNVKGGASFVSGEPNALQDGNGHGTHVAGTVAALNNTTGVLGVAYNADLYAVKVLSASGSGTLSGIAQGIEWSISNGMNVINMSLGGSSGSTALQQACNNAYNRGIVVIAAAGNSGSSGNRNTMGYPARYSSVIAVGAVSSNNTRASFSSVGSELEVMAPGVNILSTTPGNNYASFNGTSMAAPHVAGAAALIKAKSPSMTNVQIRERLKNTATNLGDPFFYGKGVINVESALQ

SEQ ID NO: 69066 - protein, 275 aa, Bacillus sp. LG1
AQTVPWGIPHIKADKAHAAGVTGSGVKVAILDTGIDANHADLNVKGGASFVSGEPNALQDGNGHGTHVAGTVAALNNTTGVLGVAYNADLYAVKVLSASGSGTLSGIAQGIEWSISNGMNVINMSLGGSSGSTALGQACNNAYNRGIVVIAAAGNSGSSGNRNTMGYPARYSSVIAVGAVSSNNTRASFSSVGSELEVMAPGVNILSTTPGNNYASFNGTSMAAPHVAGAAALIKAKYPSMTNVQIRERLKNTATNLGDPFFYGKGVINVESALQ

SEQ ID NO: 69067 - protein, 275 aa, Bacillus sp. LG1
AQTVPWGIPHIKADKIHAAGVTGSGVKVAILDTGIDANHADLNVKGGASFVSGEPNALQDGNGHGTHVAGTVAALNNTTGVLGVAYNADLYAVKVLSASGSGTLSGIAQGIEWSISNGMNVINMSLGGSSGSTALQQACNNAYNRGIVVIAAAGNSGSSGNRNTMGYPARYSSVIAVGAVSSNNTRASFSSVGSELEVMAPGVNILSTTPGNNYASFNGTSMAAPHVAGAAALIKAKYPSMTNVQIRERLKNTATNLGDPFFYGKGVINVESALQ

SEQ ID NO: 69068 - protein, 275 aa, Bacillus sp. LG1
AQTVPWGIPHIKADKAHAAGVTGSGVKVAILDTGIDANHADLNVKGGASFVSGEPNALQDGNGHGTHVAGTVAALNNTTGVLGVAYNADLYAVKVLSASGSGTLSGIAQGIEWSISNGMNVINMSLGGSSGSTALQQACNNAYNRGIVVIAAAGNSGSSGNRNTMGYPARYSSVIAVGAVSSNNTRASFSSVGSELEVMAPGVNNLSTTPGNNYASFNGTSMAAPHVAGAAALIKAKYPSMTNVQIRERLKNTATNLGDPFFYGKGVINVESALQ

SEQ ID NO: 69069 - protein, 275 aa, Bacillus sp. LG1
AQTVPWGIPHIKADKAHAAGVTGSGVKVAILDTGIDANHADLNVKGGASFVSGEPNALQDGNGHGTHVAGTVAALNNTTGVLGVASNADLYAVKVLSASGSGTLSGIAQGIEWSISNGMNVINMSLGGSSGSTALQQACNNAYNRGIVVIAAAGNSGSSGNRNTMGYPARYSSVIAVGAVSSNNTRASFSSVGSELEVMAPGVNILSTTPGNNYASFNGTSMAAPHVAGAAALIKAKYPSMTNVQIRERLKNTATNLGDPFFYGKGVINVESALQ

SEQ ID NO: 69070 - protein, 275 aa, Bacillus sp. LG1
AQTVPWGIPHIKADKTHAAGVTGSGVKVAILDTGIDANHADLNVKGGASFVSGEPNALQDGNGHGTHVAGTVAALNNTTGVLGVAYNADLYAVKVLSASGSGTLSGIAQGIEWSISNGMNVINMSLGGSSGSTALQQACNNAYNRGIVVIAAAGNSGSSGNRNTMGYPARYSSVIAVGAVSSNNTRASFSSVGSELEVMAPGVNILSTTPGNNYASFNGTSMAAPHVAGAAALIKAKYPSMTNVQIRERLKNTATNLGDPFFYGKGVINVESALQ

SEQ ID NO: 69071 - protein, 275 aa, Bacillus sp. LG1
AQTVPWGIPHIKADKAHAAGVTGSGVKVAILDTGIDANHADLNVEGGASFVSGEPNALQDGNGHGTHVAGTVAALNNTTGVLGVAYNADLYAVKVLSASGSGTLSGIAQGIEWSISNGMNVINMSLGGSSGSTALQQACNNAYNRGIVVIAAAGNSGSSGNRNTMGYPARYSSVIAVGAVSSNNTRASFSSVGSELEVMAPGVNILSTTPGNNYASFNGTSMAAPHVAGAAALIKAKYPSMTNVQIRERLKNTATNLGDPFFYGKGVINVESALQ

SEQ ID NO: 69072 - protein, 275 aa, Bacillus sp. LG1
AQTVPWGIPHIKADKAHAAGVTGSGVKVAILDTGIDANHADLNVKGGASFVSGEPNALQDGNGHGTHVAGTVAALNNTTGVLGVAYNADLYAVKVLSASGSGTLSGIAQGIEWSISNGMNVINMSLGGSSGSTALQQACNNAYNRGIVVIAAAGNSGSSGNRNTMGYPARYSSVIAVGAVSSNNTRASFSSVGSELEVMAPGVNILSTTPGNNYASFNGTSMAAPHVAGAAALIKAKCPSMTNVQIRERLKNTATNLGDPFFYGKGVINVESALQ

SEQ ID NO: 69073 - protein, 275 aa, Bacillus sp. LG1
AQTVPWGIPHIKADKAHAAGVTGSGVKVAILDTGIDAPHADLNVKGGASFVSGEPNALQDGNGHGTHVAGTVAALNNTTGVLGVAYNADLYAVKVLSASGSGTLSGIAQGIEWSISNGMNVINMSLGGSSGSTALQQACNNAYNRGIVVIAAAGNSGSSGNRNTMGYPARYSSVIAVGAVSSNNTRASFSSVGSELEVMAPGVNILSTTPGNNYASFNGTSMAAPHVAGAAALIKAKYPSMTNVQIRERLKNTATNLGDPFFYGKGVINVESALQ

SEQ ID NO: 69074 - protein, 275 aa, Bacillus sp. LG1
AQTVPWGIPHIKADKAHAAGVTGSGVKVAILDTGIDANHADLNVKGGASFVSGEPNALQDGNGHGTHVAGTVAALNNTTGVLGVAYNADLYAVKVLSASGSGTLSGIAQGIEWSISNGMNVINMSLGGSSGSTALQQACNNAYNRGIVVIAAAGNSGSSGNRNTMGYPARYSSVIAVGAVSSNNTRASFSSVGSELEVMAPGVNILSTTPGNNYASFNGTSMAAPHVAGAAALIKAKGPSMTNVQIRERLKNTATNLGDPFFYGKGVINVESALQ

SEQ ID NO: 69075 - protein, 275 aa, Bacillus sp. LG1
AQTVPWGIPHIKADKAHAAGVTGSGVKVAILDTGIDANHADLNVKGGASFVSGEPNALQDGNGHGTHVAGTVAALNNTTGVLGVAYNADLYAVKVLSASGSGTLSGIAQGIEWSISNGMNVINMSLGGSSGSTALQQACNNAYNRGIVVIAAAGNSGSSGNRNTMGYPARYSSVIAVGAVSSNNTRASFSSVGSELEVMAPGVNILSTTPGNNYASRNGTSMAAPHVAGAAALIKAKYPSMTNVQIRERLKNTATNLGDPFFYGKGVINVESALQ

SEQ ID NO: 69076 - protein, 275 aa, Bacillus sp. LG1
AQTVPWGIPHIKADKAHARGVTGSGVKVAILDTGIDANHADLNVKGGASFVSGEPNALQDGNGHGTHVAGTVAALNNTTGVLGVAYNADLYAVKVLSASGSGTLSGIAQGIEWSISNGMNVINMSLGGSSGSTALQQACNNAYNRGIVVIAAAGNSGSSGNRNTMGYPARYSSVIAVGAVSSNNTRASFSSVGSELEVMAPGVNILSTTPGNNYASFNGTSMAAPHVAGAAALIKAKYPSMTNVQIRERLKNTATNLGDPFFYGKGVINVESALQ

SEQ ID NO: 69077 - protein, 275 aa, Bacillus sp. LG1
AQTVPWGIPHIKADKAHAAGVTGSGVKVAILDTGIDANHADLNVKGGASFVSGEPNALQDGNGHGTHVAGTVAALNNTTGVLGVAYNADLYAVKVLSASGSGTLSGIAQGIEWSISNGMNVINMSLGGSSGSTALQQACNNAYNRGIVVIAAAGNSGSSGNRNTMGYPARYSSVIAVGAVSSNNTRASFSSVGSELEVMAPGVNIWSTTPGNNYASFNGTSMAAPHVAGAAALIKAKYPSMTNVQIRERLKNTATNLGDPFFYGKGVINVESALQ

SEQ ID NO: 69078 - protein, 275 aa, Bacillus sp. LG1
AQTVPWGIPHIKADKAIAAGVTGSGVKVAILDTGIDANHADLNVKGGASFVSGEPNALQDGNGHGTHVAGTVAALNNTTGVLGVAYNADLYAVKVLSASGSGTLSGIAQGIEWSISNGMNVINMSLGGSSGSTALQQACNNAYNRGIVVIAAAGNSGSSGNRNTMGYPARYSSVIAVGAVSSNNTRASFSSVGSELEVMAPGVNILSTTPGNNYASFNGTSMAAPHVAGAAALIKAKYPSMTNVQIRERLKNTATNLGDPFFYGKGVINVESALQ

SEQ ID NO: 69079 - protein, 275 aa, Bacillus subtilis
AQVTPWGITHINAHKAHSSSVTGSGVKVAVLDTGIDASHPDLNVKGGASFISGEPNALVDTNGHGTHVAGTVAALNNTIGVVGVAYNADLYAVKVLSASGSGTLSGIAQGVEWAIANNMDVINMSLGGSSGSTALKQAVDNAYASGIVVVAAAGNSGTRGRQNTMQYPARYSSVIAVGAVDSNNQRASFSSVGAELEVMAPGVSVLSTVPGGGYASYNGTSMASPHVAGAAALIKAKYPSLSASQIRDRLRNTATYLGDPFYYGNGVINVERALQ

SEQ ID NO: 69080 - protein, 275 aa, Bacillus subtilis
AQTTPWGIEHINAHKAHSSSVTGSGVKVAVLDTGIDASHEDLNVKGGASFISGEPNALVDTNGHGTHVSGTVAALNNTIGVVGVAYNADLYAVKVLSASGSGTLSGIAQGVEWAIANNMDVINMSLGGSSGSTALKQAVDNAYASGIVVVAAAGNSGTRGRQNTMGYPARYSSVIAVGAVDSNNQRASFSSVGAELEVMAPGVSVLSTVPGGGYASYNGTSMASPHVAGAAALIKAKYPSLSASQIRDRLRNTATYLGDPFYYGNGVINVERALQ

SEQ ID NO: 69081 - protein, 275 aa, Bacillus sp. LG1
AQTVPWGIPHIKADKAHAAGVTGSGVKVAILDTGIDANHADLNVDGGASFVSGEPNALQDGNGHGTHVAGTVAALNNTTGVLGVAYNADLYAVKVLSASGSGTLSGIAQGIEWSISNGMNVINMSLGGSSGSTALQQACNNAYNRGIVVIAAAGNSGSSGNRNTMGYPARYSSVIAVGAVSSNNTRASFSSVGSELEVMAPGVNILSTTPGNNYASFNGTSMAAPHVAGAAALIKAKYPSMTNVQIRERLKNTATNLGDPFFYGKGVINVESALQ

SEQ ID NO: 69082 - protein, 275 aa, Bacillus sp. LG1
AQTVPWGIPHIKADKAHAAGVTGSGVKVAILDTGIDANHADLNVKGGASFVSGEPNALQDGNGHGTHVAGTVAALNNTTGVLGVAYNADLYAVKVLSASGSGTLSGIAQGIEWSISNGMNVINMSLGGSSGSTALQQACNNAYNRGIVVIAAAGNSGSSGNRNTMGYPARYSSVIAVGAVSSNNTRASFSSVGSELEVMAPGVNIVSTTPGNNYASFNGTSMAAPHVAGAAALIKAKYPSMTNVQIRERLKNTATNLGDPFFYGKGVINVESALQ

SEQ ID NO: 69083 - protein, 275 aa, Bacillus sp. LG1
AQTVPWGIPHIKADKAHAAGVTGSGVKVAILDTGIDANHADLNVKGGASFVSGEPNALQDGNGHGTHVAGTVAALNNTTGVLGVAQNADLYAVKVLSASGSGTLSGIAQGIEWSISNGMNVINMSLGGSSGSTALQQACNNAYNRGIVVIAAAGNSGSSGNRNTMGYPARYSSVIAVGAVSSNNTRASFSSVGSELEVMAPGVNILSTTPGNNYASFNGTSMAAPHVAGAAALIKAKYPSMTNVQIRERLKNTATNLGDPFFYGKGVINVESALQ

SEQ ID NO: 69084 - protein, 275 aa, Bacillus sp. LG1
AQTVPWGIPHIKADKAHAAGVTGSGVKVAILDTGIDANHADLNVKGGASFVSGEPNALQDGNGHGTHVAGTVAALNNTTGVLGVAYNADLYAVKVLSASGSGTLSGILQGIEWSISNGMNVINMSLGGSSGSTALQQACNNAYNRGIVVIAAAGNSGSSGNRNTMGYPARYSSVIAVGAVSSNNTRASFSSVGSELEVMAPGVNILSTTPGNNYASFNGTSMAAPHVAGAAALIKAKYPSMTNVQIRERLKNTATNLGDPFFYGKGVINVESALQ

SEQ ID NO: 69085 - protein, 275 aa, Bacillus sp. LG1
AQTVPWGIPHIKADKAHAAGVTGSGVKVAILDTGIDANHADLNVKGGASFVSGEPNSLQDGNGHGTHVAGTVAALNNTTGVLGVAYNADLYAVKVLSASGSGTLSGIAQGIEWSISNGMNVINMSLGGSSGSTALQQACNNAYNRGIVVIAAAGNSGSSGNRNTMGYPARYSSVIAVGAVSSNNTRASFSSVGSELEVMAPGVNILSTTPGNNYASFNGTSMAAPHVAGAAALIKAKYPSMTNVQIRERLKNTATNLGDPFFYGKGVINVESALQ

SEQ ID NO: 69086 - protein, 275 aa, Bacillus sp. LG1
AQTVPWGIPHIKADKAHAAGVTGSGVKVAILDTGIDANHADLNVKGGASFVSGEPNDLQDGNGHGTHVAGTVAALNNTTGVLGVAYNADLYAVKVLSASGSGTLSGIAQGIEWSISNGMNVINMSLGGSSGSTALQQACNNAYNRGIVVIAAAGNSGSSGNRNTMGYPARYSSVIAVGAVSSNNTRASFSSVGSELEVMAPGVNILSTTPGNNYASFNGTSMAAPHVAGAAALIKAKYPSMTNVQIRERLKNTATNLGDPFFYGKGVINVESALQ

SEQ ID NO: 69087 - protein, 275 aa, Bacillus sp. LG1
AQTVPWGIPHIKADKAHAAGVTGSGVKVAILDTGIDANHADLNVKGGASFVSGEPNALQDGNGHGTHVAGTVAALNNTTGVLGVAYNADLYAVKVLSASGSGTLSGIAQGIEWSISNGMNVINMSLGGKSGSTALQQACNNAYNRGIVVIAAAGNSGSSGNRNTMGYPARYSSVIAVGAVSSNNTRASFSSVGSELEVMAPGVNILSTTPGNNYASFNGTSMAAPHVAGAAALIKAKYPSMTNVQIRERLKNTATNLGDPFFYGKGVINVESALQ

SEQ ID NO: 69088 - protein, 275 aa, Bacillus sp. LG1
AQTVPWGIPHIKADKAHAAGVTGSGVKVAILDTGIDANHADLNVKGGASFVSGEPNAIQDGNGHGTHVAGTVAALNNTTGVLGVAYNADLYAVKVLSASGSGTLSGIAQGIEWSISNGMNVINMSLGGSSGSTALQQACNNAYNRGIVVIAAAGNSGSSGNRNTMGYPARYSSVIAVGAVSSNNTRASFSSVGSELEVMAPGVNILSTTPGNNYASFNGTSMAAPHVAGAAALIKAKYPSMTNVQIRERLKNTATNLGDPFFYGKGVINVESALQ

SEQ ID NO: 69089 - protein, 275 aa, Bacillus sp. LG1
AQTVPWGIPHIKADKAHAAGVTGSGVKVAILDTGIDANHADLNVKGGASFVSGEPNALQDGNGHGTHVAGTVAALNNTTGVLGVAYNADLYAVKVLSASGSGTLSGIAQGIEWSISNGMNVINMSLGGSSGSTALQQACNNAYNRGIVVIAAAGNSGSSGNRNTMGYPARYSSVIAVGAVSSNNTRASFSSVGSELEVMAPGVNILSTTPGNFYASFNGTSMAAPHVAGAAALIKAKYPSMTNVQIRERLKNTATNLGDPFFYGKGVINVESALQ

SEQ ID NO: 69090 - protein, 275 aa, Bacillus sp. LG1
AQTVPWGIPHIKADKAHAAGVTGSGVKVAILDTGIDANHADLNVKGGASFVSGEPNALQDGNGHGTHVAGTVAALNNTTGVLGVAYNADLYAVKVLSASGSGTLSGIAQGIEWSISNGMNVINMSLGGSSGSTALQQACNNAYNRGIVVIAAAGNSGSSGNRNTMGYPARYSSVIAVGAVSSNNTRASFSSVGSELEVMAPGVNILSTTPGNNYAAFNGTSMAAPHVAGAAALIKAKYPSMTNVQIRERLKNTATNLGDPFFYGKGVINVESALQ

SEQ ID NO: 69091 - protein, 275 aa, Bacillus sp. LG1
AQTVPWGIPHIKADKAHAAGVTGSGVKVAILDTGIDANHADLNVKGGASFVSGEPNALQDGNGHGTHVAGTVAALNNTTGVLGVAYNADLYAVKVLSASGSGTLSGIAQGIEWSISNGMNVINMSLGGSSGSTALQQACQNAYNRGIVVIAAAGNSGSSGNRNTMGYPARYSSVIAVGAVSSNNTRASFSSVGSELEVMAPGVNILSTTPGNNYASFNGTSMAAPHVAGAAALIKAKYPSMTNVQIRERLKNTATNLGDPFFYGKGVINVESALQ

SEQ ID NO: 69092 - protein, 275 aa, Bacillus sp. LG1
AQTVPWGIPHIKADKAHAAGVTGSGVKVAILDTGIDANHADLNVKGGASFVSGEPNALQDGNGHGTHVAGTVAALNNTTGVLGVAYNADLYAVKVLSASGSGTLSGIAQGIEWSISNGMNVINMSLGGSSGSTALQQACNNAYNRGIVVIAAAGNSGSSGNRNTMGYPARYSSVIAVGAVSSNNTRASFSSVGSELEVMAPGVNILSTTPGNNYASFNGTSMAAPHVAGAAALIKAKYPSMTNVQIRARLKNTATNLGDPFFYGKGVINVESALQ

SEQ ID NO: 69093 - protein, 275 aa, Bacillus sp. LG1
AQTVPWGIPHIKADKAHAAGVTGSGVKVAILDTGIDANHLDLNVKGGASFVSGEPNALQDGNGHGTHVAGTVAALNNTTGVLGVAYNADLYAVKVLSASGSGTLSGIAQGIEWSISNGMNVINMSLGGSSGSTALQQACNNAYNRGIVVIAAAGNSGSSGNRNTMGYPARYSSVIAVGAVSSNNTRASFSSVGSELEVMAPGVNILSTTPGNNYASFNGTSMAAPHVAGAAALIKAKYPSMTNVQIRERLKNTATNLGDPFFYGKGVINVESALQ

SEQ ID NO: 69094 - protein, 275 aa, Bacillus sp.
AQTVPWGIPHIKADKAHAAGVTGSGVKVAILDTGIDANHADLNVKGGASFVSGEPNALQDGNGHGTHVAGTVAALDNTTGVLGVAYNADLYAVKVLSASGSGTLSGIAQGIEWSISNGMNVINMSLGGSSGSTALQQACNNAYNRGIVVIAAAGNSGSSGNRNTMDYPARYSSVIAVGAVSSNNTRASFSSVGSELEVMAPGVNILSTTPGNNYASFNGTSMAAPHVAGAAALIKAKYPSMTNVQIRKRLKNTATNLGDPFFYGKGVINVESALQ

SEQ ID NO: 69095 - protein, 275 aa, Bacillus sp. LG1
AQTVPWGIPHIKADKAHAAGVTGSGVKVAILDTGIDANHADLNVKGGASFVSGEPNALQDGNGHGTHVAGTVAALNNTTGVLGVAYNADLYAVKVLSASGSGTLSGIAQGIEWSISNGMNVINMSLGGTSGSTALQQACNNAYNRGIVVIAAAGNSGSSGNRNTMGYPARYSSVIAVGAVSSNNTRASFSSVGSELEVMAPGVNILSTTPGNNYASFNGTSMAAPHVAGAAALIKAKYPSMTNVQIRERLKNTATNLGDPFFYGKGVINVESALQ

SEQ ID NO: 69096 - protein, 275 aa, Bacillus sp. LG1
AQTVPWGIPHIKADKAHAAGVTGSGVKVAILDTGIDANHADLNVKGGASFVSGEPNALQDGNGHGTHVAGTVAALNNTTGVLGVAYNADLYAVKVLSASGSGTLSGIAQGIEWSISNGMNVINMSLGGSSGSTALQQACNNAYNRGIVVIAAAGNSGSSGNRNTMGYPARYSSVIAVGAVNSNNTRASFSSVGSELEVMAPGVNILSTTPGNNYASFNGTSMAAPHVAGAAALIKAKYPSMTNVQIRERLKNTATNLGDPFFYGKGVINVESALQ

SEQ ID NO: 69097 - protein, 275 aa, Bacillus sp. LG1
AQTVPWGIPHIKADKAHAAGVTGSGVKVAILDTGIDANHADLNVKGGASFVSGEPNALQDGNGHGTHVAGTVAALNNTTGVLGVAYNADLYAVKVLSASGSGTLSGIAQGIEWSISNGMNVINMSLGGSSGSTALQQACNNAYNRGIVVIAAAGNSGSSGNRNTMGYPARYSSVIAVGAVSSNNTRASFSSVGSELEVMAPGVNCLSTTPGNNYASFNGTSMAAPHVAGAAALIKAKYPSMTNVQIRERLKNTATNLGDPFFYGKGVINVESALQ

SEQ ID NO: 69098 - protein, 275 aa, Bacillus sp. LG1
AQTVPWGIPHIKADKAHAAGVTGSGVKVAILDTGIDANHADLNVKGGASFVSGEPNALQDGNGHGTHVAGTVAALNNTTGVLGVAYNADLYAVKVLSASGSGTLSGIAQGIEWSISNGMNVINMSLGGSSGSTALQQACNNAYNRGIVVIAAAGNSGSSGNRNTMGYPARYSSVIAVGAVSSNNTRASFSSVGSELEVMAPGVNILSTTPGNNYASFNGTSMAAPHVAGAAALIKAKYPSMTNVQIRERLKFTATNLGDPFFYGKGVINVESALQ

SEQ ID NO: 69099 - protein, 275 aa, Bacillus sp. LG1
AQTVPWGIPHIKADKAHAAGVTGSGVKVAILDTGIDANHADLNVKGGASFVSGEPNALQDGNGHGTHVAGTVAALNNTTGVLGVAYNADLYAVKVLSASGSGTISGIAQGIEWSISNGMNVINMSLGGSSGSTALQQACNNAYNRGIVVIAAAGNSGSSGNRNTMGYPARYSSVIAVGAVSSNNTRASFSSVGSELEVMAPGVNILSTTPGNNYASFNGTSMAAPHVAGAAALIKAKYPSMTNVQIRERLKNTATNLGDPFFYGKGVINVESALQ

SEQ ID NO: 69100 - protein, 275 aa, Bacillus sp. LG1
AQTVPWGIPHIKADKAHAAGVTGSGVKVAILDTGIDANHADLNVKGGASFVSGEPNALQDGNGHGTHVAGTVAALNNTTGVLGVAYNADLYAVKVLSASGSGTLSGIAQGIEWSISNGMNVINMSLGGSSGSTALQQACNNAYNRGIVVIAAAGNSGSSGNRNTMGYPARYSSVIAVGAVSSNNTRASFSSVGSELEVMAPGVNILSTEPGNNYASFNGTSMAAPHVAGAAALIKAKYPSMTNVQIRERLKNTATNLGDPFFYGKGVINVESALQ

SEQ ID NO: 69101 - protein, 275 aa, Bacillus sp. LG1
AQTVPWGIPHIKADKAHAAGVDGSGVKVAILDTGIDANHADLNVKGGASFVSGEPNALQDGNGHGTHVAGTVAALNNTTGVLGVAYNADLYAVKVLSASGSGTLSGIAQGIEWSISNGMNVINMSLGGSSGSTALQQACNNAYNRGIVVIAAAGNSGSSGNRNTMGYPARYSSVIAVGAVSSNNTRASFSSVGSELEVMAPGVNILSTTPGNNYASFNGTSMAAPHVAGAAALIKAKYPSMTNVQIRERLKNTATNLGDPFFYGKGVINVESALQ

SEQ ID NO: 69102 - protein, 275 aa, Bacillus sp. LG1
AQTVPWGIPHIKADKAHAAGVTGSGVKVAILDTGIDANHADLNVKGGASFVSGEPNLLQDGNGHGTHVAGTVAALNNTTGVLGVAYNADLYAVKVLSASGSGTLSGIAQGIEWSISNGMNVINMSLGGSSGSTALQQACNNAYNRGIVVIAAAGNSGSSGNRNTMGYPARYSSVIAVGAVSSNNTRASFSSVGSELEVMAPGVNILSTTPGNNYASFNGTSMAAPHVAGAAALIKAKYPSMTNVQIRERLKNTATNLGDPFFYGKGVINVESALQ

SEQ ID NO: 69103 - protein, 275 aa, Bacillus sp. LG1
AQTVPWGIPHIKADKAHAAGVTGSGVKVAILDTGIDANHADLNVKGGASFVSGEPNALQDGNGHGTHVAGTVAALNNTTGVLGVAYNALLYAVKVLSASGSGTLSGIAQGIEWSISNGMNVINMSLGGSSGSTALQQACNNAYNRGIVVIAAAGNSGSSGNRNTMGYPARYSSVIAVGAVSSNNTRASFSSVGSELEVMAPGVNILSTTPGNNYASFNGTSMAAPHVAGAAALIKAKYPSMTNVQIRERLKNTATNLGDPFFYGKGVINVESALQ

SEQ ID NO: 69104 - protein, 275 aa, Bacillus sp. LG1
AQTVPWGIPHIKADKAHAAGVTGSGVKVAILDTGIDANHADLNVKGGASFVSGEPNALQDGNGHGTHVAGTVAALNNTTGVLGVAYNADLYAVKVLSASGSGTLSGIAQGIEWSISNGMNVINMSLGGSSGSTALDQACNNAYNRGIVVIAAAGNSGSSGNRNTMGYPARYSSVIAVGAVSSNNTRASFSSVGSELEVMAPGVNILSTTPGNNYASFNGTSMAAPHVAGAAALIKAKYPSMTNVQIRERLKNTATNLGDPFFYGKGVINVESALQ

SEQ ID NO: 69105 - protein, 275 aa, Bacillus sp. LG1
AQTVPWGIPHIKADKAHAAGVTGSGVKVAILDTGIDANHADLNVKGGASFVSGEPHALQDGNGHGTHVAGTVAALNNTTGVLGVAYNADLYAVKVLSASGSGTLSGIAQGIEWSISNGMNVINMSLGGSSGSTALQQACNNAYNRGIVVIAAAGNSGSSGNRNTMGYPARYSSVIAVGAVSSNNTRASFSSVGSELEVMAPGVNILSTTPGNNYASFNGTSMAAPHVAGAAALIKAKYPSMTNVQIRERLKNTATNLGDPFFYGKGVINVESALQ

SEQ ID NO: 69106 - protein, 275 aa, Bacillus sp. LG1
AQTVPWGIPHIKADKAHAAGVTGSGVKVAILDTGIDANHADLNVKGGASFVSGEPNALQDGNGHGTHVAGTVAALNNTTGVLGVAYNADLYAVKVLSASGSGTLSGIAQGIEWSISNGMNVINMSLGGSSGSTALQQACYNAYNRGIVVIAAAGNSGSSGNRNTMGYPARYSSVIAVGAVSSNNTRASFSSVGSELEVMAPGVNILSTTPGNNYASFNGTSMAAPHVAGAAALIKAKYPSMTNVQIRERLKNTATNLGDPFFYGKGVINVESALQ

SEQ ID NO: 69107 - protein, 275 aa, Bacillus sp. LG1
AQTVPWGIPHIKADKAHAAGVTGSGVKVAILDTGIDANHADLNVKGGASFVSGEPNALQDGNGHGTHVAGTVAALNNTTGVLGVAYNADLYAVKVLSASGSGHLSGIAQGIEWSISNGMNVINMSLGGSSGSTALQQACNNAYNRGIVVIAAAGNSGSSGNRNTMGYPARYSSVIAVGAVSSNNTRASFSSVGSELEVMAPGVNILSTTPGNNYASFNGTSMAAPHVAGAAALIKAKYPSMTNVQIRERLKNTATNLGDPFFYGKGVINVESALQ

SEQ ID NO: 69108 - protein, 275 aa, Bacillus sp. LG1
AQTVPWGIPHIKADKAHAAGVTGSGVKVAILDTGIDANHADLNVKGGASFVSGEPNALQDGNGHGTHVAGTVAALKNTTGVLGVAYNADLYAVKVLSASGSGTLSGIAQGIEWSISNGMNVINMSLGGSSGSTALQQACNNAYNRGIVVIAAAGNSGSSGNRNTMGYPARYSSVIAVGAVSSNNTRASFSSVGSELEVMAPGVNILSTTPGNNYASFNGTSMAAPHVAGAAALIKAKYPSMTNVQIRERLKNTATNLGDPFFYGKGVINVESALQ

SEQ ID NO: 69109 - protein, 275 aa, Bacillus subtilis
AQTTPWGITHINAHKAHSSSVTGSGVKVAVLDTGIDASHEDLNVKGGASFISGEPNALVDTNGHGTHVAGTVAALNNTIGVVGVAYNADLYAVKVLSASGSGTLSGIAQGVEWAIANNMDVINMSLGGSSGSTALKQAVDNAYASGIVVVAAAGNSGTRGRQNTMQYPARYSSVIAVGAVDSNNQRASFSSVGAELEVMAPGVSVLSTVPGGGYASYNGTSMASPHVAGAAALIKAKYPSLSASQIRDRLRNTATYLGDPFYYGNGVINVERALQ

SEQ ID NO: 69110 - protein, 275 aa, Bacillus sp. LG1
AQTVPWGIPHIKADKAHAAGVTGSGVKVAILDTGIDALHADLNVKGGASFVSGEPNALQDGNGHGTHVAGTVAALNNTTGVLGVAYNADLYAVKVLSASGSGTLSGIAQGIEWSISNGMNVINMSLGGSSGSTALQQACNNAYNRGIVVIAAAGNSGSSGNRNTMGYPARYSSVIAVGAVSSNNTRASFSSVGSELEVMAPGVNILSTTPGNNYASFNGTSMAAPHVAGAAALIKAKYPSMTNVQIRERLKNTATNLGDPFFYGKGVINVESALQ

SEQ ID NO: 69111 - protein, 275 aa, Bacillus sp. LG1
AQTVPWGIPHIKADKAHAAGVTGSGVKVAILDTGIDANHADLNVKGGASFVSGEPNALQDGNGHGTHVAGTVAALNNTTGVLGVAYNADLYAVKVLSASGSGTLSGIAQGIEWSISNGMNVINMSLGGSSGSTALQQACNNAYNRGIVVIAAAGNSGSSGNRNTMGYPARYSSVIAVGAVSSNNTRASFSSVGSELEVMAPGVNILSTTPGNNYASFNGTSMAAPHVAGAAALIKAKYPSMTNVQIRERLKNTATNLGDPFFYGKGNINVESALQ

SEQ ID NO: 69112 - protein, 275 aa, Bacillus sp. LG1
AQTVPWGIPHIKADKAHAAGGTGSGVKVAILDTGIDANHADLNVKGGASFVSGEPNALQDGNGHGTHVAGTVAALNNTTGVLGVAYNADLYAVKVLSASGSGTLSGIAQGIEWSISNGMNVINMSLGGSSGSTALQQACNNAYNRGIVVIAAAGNSGSSGNRNTMGYPARYSSVIAVGAVSSNNTRASFSSVGSELEVMAPGVNILSTTPGNNYASFNGTSMAAPHVAGAAALIKAKYPSMTNVQIRERLKNTATNLGDPFFYGKGVINVESALQ

SEQ ID NO: 69113 - protein, 275 aa, Bacillus sp. LG1
AQTVPWGIPHIKADKAHAAGVQGSGVKVAILDTGIDANHADLNVKGGASFVSGEPNALQDGNGHGTHVAGTVAALNNTTGVLGVAYNADLYAVKVLSASGSGTLSGIAQGIEWSISNGMNVINMSLGGSSGSTALQQACNNAYNRGIVVIAAAGNSGSSGNRNTMGYPARYSSVIAVGAVSSNNTRASFSSVGSELEVMAPGVNILSTTPGNNYASFNGTSMAAPHVAGAAALIKAKYPSMTNVQIRERLKNTATNLGDPFFYGKGVINVESALQ

SEQ ID NO: 69114 - protein, 275 aa, Bacillus subtilis
AQTTPWGITHINAHKAHSSSVTGSGVKVAVLDTGIDASHEDLNVKGGASFISGEPNALVDTNGHGTHVSGTVAALNNNIGVVGVAYNADLYAVKVLSASGSGTLSGIAQGVEWAIANNMDVINMSLGGSSGSTALKQAVDNAYASGIVVVAAAGNSGTRGRQNTMGYPARYSSVIAVGAVDSNNNRASFSSVGAELEVMAPGVSVLSTVPGGGYASYNGTSMASPHVAGAAALIKAKYPSLSASQIRDRLRNTATYLGDPFYYGNGVINVERALQ

SEQ ID NO: 69115 - protein, 275 aa, Bacillus subtilis
AQTTPWGITHINAHKAHSSSVTGSGVKVAVLDTGIDASHPDLNVKGGASFISGEPNALVDTNGHGTHVSGTVAALNNNIGVVGVAYNADLYAVKVLSASGSGTLSGIAQGVEWAIANNMDVINMSLGGSSGSTALKQAVDNAYASGIVVVAAAGNSGTRGRQNTMQYPARYSSVIAVGAVDSNNNRASFSSVGAELEVMAPGVSVLSTVPGGGYASYNGTSMASPHVAGAAALIKAKYPSLSASQIRDRLRNTATYLGDPFYYGNGVINVERALQ

SEQ ID NO: 69116 - protein, 275 aa, Bacillus sp. LG1
AQTVPHGIPHIKADKAHAAGVTGSGVKVAILDTGIDANHADLNVKGGASFVSGEPNALQDGNGHGTHVAGTVAALNNTTGVLGVAYNADLYAVKVLSASGSGTLSGIAQGIEWSISNGMNVINMSLGGSSGSTALQQACNNAYNRGIVVIAAAGNSGSSGNRNTMGYPARYSSVIAVGAVSSNNTRASFSSVGSELEVMAPGVNILSTTPGNNYASFNGTSMAAPHVAGAAALIKAKYPSMTNVQIRERLKNTATNLGDPFFYGKGVINVESALQ

SEQ ID NO: 69117 - protein, 275 aa, Bacillus sp. LG1
AQTVPWGIPHIKADKAHAAGVTGSGVKVAILDTGIDANHADLNVKGGASFVSGEPNALQDGNGHGTHVAGTVAALNNTTGVLGVAYNADLYAVKVLHASGSGTLSGIAQGIEWSISNGMNVINMSLGGSSGSTALQQACNNAYNRGIVVIAAAGNSGSSGNRNTMGYPARYSSVIAVGAVSSNNTRASFSSVGSELEVMAPGVNILSTTPGNNYASFNGTSMAAPHVAGAAALIKAKYPSMTNVQIRERLKNTATNLGDPFFYGKGVINVESALQ

SEQ ID NO: 69118 - protein, 275 aa, Bacillus sp. LG1
AQTVPWGIPHIKADKAHAAGVTGSGVKVAILDTGIDANHADLNVKGGASFVSGEPNALQDGNGHGTHVAGTVAALINTTGVLGVAYNADLYAVKVLSASGSGTLSGIAQGIEWSISNGMNVINMSLGGSSGSTALQQACNNAYNRGIVVIAAAGNSGSSGNRNTMGYPARYSSVIAVGAVSSNNTRASFSSVGSELEVMAPGVNILSTTPGNNYASFNGTSMAAPHVAGAAALIKAKYPSMTNVQIRERLKNTATNLGDPFFYGKGVINVESALQ

SEQ ID NO: 69119 - protein, 275 aa, Bacillus sp. LG1
AQTVPWGIPHIKADKAHAAGVTGSGVKVAILDTGIDANHADLNVKGGASFVSGEPNALQDGNGHGTHVAGTVAALNNTTGVLGVAYNADLYAVKVLSASGSGTLSGIAQGIEWSISNGMNVINMSLGGSSGSTALQQACNNAYNRGIVVIAAAGNSGSSGNRNTMGYPARYSSVIAVGAVSSNNTRASFSSVGSELEVMAPGVNILSTTPGNNYASFNGTSMAAPHVAGAAALIEAKYPSMTNVQIRERLKNTATNLGDPFFYGKGVINVESALQ

SEQ ID NO: 69120 - protein, 275 aa, Bacillus sp. LG1
AQTVPWGIPHIKADKAHAAGVTGSGVKVAILDTGIDANHADLNVKGGASFVQGEPNALQDGNGHGTHVAGTVAALNNTTGVLGVAYNADLYAVKVLSASGSGTLSGIAQGIEWSISNGMNVINMSLGGSSGSTALQQACNNAYNRGIVVIAAAGNSGSSGNRNTMGYPARYSSVIAVGAVSSNNTRASFSSVGSELEVMAPGVNILSTTPGNNYASFNGTSMAAPHVAGAAALIKAKYPSMTNVQIRERLKNTATNLGDPFFYGKGVINVESALQ

SEQ ID NO: 69121 - protein, 275 aa, Bacillus subtilis
AQTTPWGITHINAHKAHSSSVTGSGVKVAVLDTGIDASHPDLNVKGGASFISGEPNALVDTNGHGTHVSGTVAALDNNIGVVGVAYNADLYAVKVLSASGSGTLSGIAQGVEWAIANNMDVINMSLGGSSGSTALKQAVDNAYASGIVVVAAAGNSGTRGRQNTMQYPARYSSVIAVGAVDSNNQRASFSSVGAELEVMAPGVSVLSTVPGGGYASYNGTSMASPHVAGAAALIKAKYPSLSASQIRDRLRNTATYLGDPFYYGNGVINVERALQ

SEQ ID NO: 69122 - protein, 275 aa, Bacillus subtilis
AQVTPWGITHINAHKAHSSSVTGSGVKVAVLDTGIDASHPDLNVKGGASFISGEPNALVDTNGHGTHVAGTVAALNNNIGVVGVAYNADLYAVKVLSASGSGTLSGIAQGVEWAIANNMDVINMSLGGSSGSTALKQAVDNAYASGIVVVAAAGNSGTRGRQNTMGYPARYSSVIAVGAVDSNNQRASFSSVGAELEVMAPGVSVLSTVPGGGYASYNGTSMASPHVAGAAALIKAKYPSLSASQIRDRLRNTATYLGDPFYYGNGVINVERALQ

SEQ ID NO: 69123 - protein, 275 aa, Bacillus sp. LG1
AQTVPWGIPHIKADKAHAAGVTGSGVKVAILDTGIDANHADLNVKGGASFVSGEPNALQDGNGHGTHVAGTVAALNNTTGVLGVAYNADLYAVKVLSASGSGTLSGIAQGIEWSISNGMNVINMSLGGSSGSTALQQACNNAYHRGIVVIAAAGNSGSSGNRNTMGYPARYSSVIAVGAVSSNNTRASFSSVGSELEVMAPGVNILSTTPGNNYASFNGTSMAAPHVAGAAALIKAKYPSMTNVQIRERLKNTATNLGDPFFYGKGVINVESALQ

SEQ ID NO: 69124 - protein, 275 aa, Bacillus sp. LG1
AQTVPWGIPHIKADKAHAAGVTGSGVKVAILDTGIDANHADLNVKGGASFVSGEPNALQDGNGHGTHVAGTVAALNNTTGVLGVAYNADLYAVKVLSASGSGTLSGIAQGIEWSISNGMNVINMSLGGSSGSTALQQACNNAYNRGIVVIAAAGNSGSSGNRNTMGYPARYSSVIAVGAVSSNNTRASFSSVGSELEVMAPGVNILSTTPGNNYASFNGTSMAAPHVAGAAALIKAKYPSMTNVQIRERLKNTATNLGDPFFYGKGVINVEPALQ

SEQ ID NO: 69125 - protein, 275 aa, Bacillus sp. LG1
AQTVPWGIPHIKADKAHAAGVTGSGVKVAILDTGIDANHADLNVKGGASFVSGEPNALQDGNGHGTHVAGTVAALNNTTGVLGVAYNADLYAVKVLSASGSGTLSGIAQGIEWSISNGMNVINMSLGGSSGSTALQQACNNAYNRGIVVIAAAGNSGSSGNRNTMGYPARYSSVIAVGAVSSNHTRASFSSVGSELEVMAPGVNILSTTPGNNYASFNGTSMAAPHVAGAAALIKAKYPSMTNVQIRERLKNTATNLGDPFFYGKGVINVESALQ

SEQ ID NO: 69126 - protein, 275 aa, Bacillus sp. LG1
AQTVPWGIPHIKADKAHAAGVTGSGVKVAILDTGIDANHGDLNVKGGASFVSGEPNALQDGNGHGTHVAGTVAALNNTTGVLGVAYNADLYAVKVLSASGSGTLSGIAQGIEWSISNGMNVINMSLGGSSGSTALQQACNNAYNRGIVVIAAAGNSGSSGNRNTMGYPARYSSVIAVGAVSSNNTRASFSSVGSELEVMAPGVNILSTTPGNNYASFNGTSMAAPHVAGAAALIKAKYPSMTNVQIRERLKNTATNLGDPFFYGKGVINVESALQ

SEQ ID NO: 69127 - protein, 275 aa, Bacillus sp. LG1
AQTVPWGIPHIKADKAHAAGVTGSGVKVAILDTGIDANHADLNVKGGASFVSGEMNALQDGNGHGTHVAGTVAALNNTTGVLGVAYNADLYAVKVLSASGSGTLSGIAQGIEWSISNGMNVINMSLGGSSGSTALQQACNNAYNRGIVVIAAAGNSGSSGNRNTMGYPARYSSVIAVGAVSSNNTRASFSSVGSELEVMAPGVNILSTTPGNNYASFNGTSMAAPHVAGAAALIKAKYPSMTNVQIRERLKNTATNLGDPFFYGKGVINVESALQ

SEQ ID NO: 69128 - protein, 275 aa, Bacillus sp. LG1
AQTVPWGIPHIKADKAHAAGVTGIGVKVAILDTGIDANHADLNVKGGASFVSGEPNALQDGNGHGTHVAGTVAALNNTTGVLGVAYNADLYAVKVLSASGSGTLSGIAQGIEWSISNGMNVINMSLGGSSGSTALQQACNNAYNRGIVVIAAAGNSGSSGNRNTMGYPARYSSVIAVGAVSSNNTRASFSSVGSELEVMAPGVNILSTTPGNNYASFNGTSMAAPHVAGAAALIKAKYPSMTNVQIRERLKNTATNLGDPFFYGKGVINVESALQ

SEQ ID NO: 69129 - protein, 275 aa, Bacillus sp. LG1
AQTVPWGIPHIKADKAHAAGVTGSGVKVAILDTGIDANHADLNVKGGASFVSGEPNALQDGNGHGTHVAGTVAALNNTTGVLGVAYNADLYAVKVLSASGSGTLSGIAQGIEWSISNGMNVINMSLGGSSGSTALVQACNNAYNRGIVVIAAAGNSGSSGNRNTMGYPARYSSVIAVGAVSSNNTRASFSSVGSELEVMAPGVNILSTTPGNNYASFNGTSMAAPHVAGAAALIKAKYPSMTNVQIRERLKNTATNLGDPFFYGKGVINVESALQ

SEQ ID NO: 69130 - protein, 275 aa, Bacillus sp. LG1
AQTVPWGIPHIKADKAHAAGVTGSGVKVAILDTGIDANHADLNVKGGASFVSGEPNALQDGNGHGTHVAGTVAALNNTTGVLGVAYNADLYAVKVLSASGSGTLSGIAQGIEWSISNGMNVINMSLGGSSGSTALQQACNNAYNRGIVVIAAAGNSGSSGNRNTMGYPARYSSVIAVGAVSSNNTRASFSSVGSELEVMAPGENILSTTPGNNYASFNGTSMAAPHVAGAAALIKAKYPSMTNVQIRERLKNTATNLGDPFFYGKGVINVESALQ

SEQ ID NO: 69131 - protein, 275 aa, Bacillus sp. LG1
AQTVPWGIPHIKADKAHAAGVTGSGVKVAILDTGIDANHADLNVKGGASFVSGEPNALQDGNGHGTHVAGTVAALNNTTGVLGVAYNADLYAVKVLSASGSGTLSGIAQGIEWSISNGMNVINMSLGGSSGSTALQQACNNAYNRGIVVIAAAGNSGSSGNRNTMGYPARYSSVIAVGAVSSNNTRASFSSVGSELEVMAPGVNILSTTPGNNYASFNGTSMAAPHVAGAAALIDAKYPSMTNVQIRERLKNTATNLGDPFFYGKGVINVESALQ

SEQ ID NO: 69132 - protein, 275 aa, Bacillus sp. LG1
AQTVPWGIPHIKADKAHAAGVTGSGVKVAILDTGIDANHADLNVKGGASFVSGEPNALQDGNGHGTHVAGTVAALNNTTGVLGVAYNADLYAVKVLSASGSGTLSGIAQGIEWSISNGMNVINMSLGGSSGSTALQQACNNAYNRGIVVIAAAGNSGSSGNRNTMGYPARYSSVIAVGAVSSNNTRASFSSVGSELEVMAPGVNILSTTPGNNYASFNGTSMAAPHVAGAAALIKAKYPSMTNYQIRERLKNTATNLGDPFFYGKGVINVESALQ

SEQ ID NO: 69133 - protein, 275 aa, Bacillus sp. LG1
AQTVPWGIPHIKADKAHAAGVTGSGVKVAILDTGIDANHHDLNVKGGASFVSGEPNALQDGNGHGTHVAGTVAALNNTTGVLGVAYNADLYAVKVLSASGSGTLSGIAQGIEWSISNGMNVINMSLGGSSGSTALQQACNNAYNRGIVVIAAAGNSGSSGNRNTMGYPARYSSVIAVGAVSSNNTRASFSSVGSELEVMAPGVNILSTTPGNNYASFNGTSMAAPHVAGAAALIKAKYPSMTNVQIRERLKNTATNLGDPFFYGKGVINVESALQ

SEQ ID NO: 69134 - protein, 275 aa, Bacillus sp. LG1
AQTVPWGIPHIKADKAHAAGVTGSGVKVAILDTGIDANHADLNVKGGASFVSGEPNALQDGNGHGTHVAGTVAALNNTTGVLGVAYNADLYAVKVLSASGSGALSGIAQGIEWSISNGMNVINMSLGGSSGSTALQQACNNAYNRGIVVIAAAGNSGSSGNRNTMGYPARYSSVIAVGAVSSNNTRASFSSVGSELEVMAPGVNILSTTPGNNYASFNGTSMAAPHVAGAAALIKAKYPSMTNVQIRERLKNTATNLGDPFFYGKGVINVESALQ

SEQ ID NO: 69135 - protein, 275 aa, Bacillus amyloliquefaciens
AQSVPYGVSQIKAPALHSQGYTGSNVKVAVIDSGIDSSHPDLKVAGGASMVPSETNPFQDNNGHGTHVAGTVAALDNSIGVLGVAPSASLYAVKVLGADGSGQYSWIINGIEWAIANNMDVINMSLGGPSGSAALKAAVDKAVASGVVVVAAAGNEGTSGSSSTVGYPGKYPSVIAVGAVDSSNQRASFSSVGPELDVMAPGVSIQSTWPGNKYAALNGTSMASPHVAGAAALILSKHPNWTNTQVRSSLENTTTKLGDSFYYGKGLINVQAAAQ

SEQ ID NO: 69136 - protein, 275 aa, Bacillus sp. LG1
AQTVPWGIPHIKADKAHAAGVTGSGVKVAILDTGIDANHADLNVKGGASFVSGEPNALQDGNGHGTHVAGTVAALNNTTGVLGVAYNADLYAVKVLSASGSGTTSGIAQGIEWSISNGMNVINMSLGGSSGSTALQQACNNAYNRGIVVIAAAGNSGSSGNRNTMGYPARYSSVIAVGAVSSNNTRASFSSVGSELEVMAPGVNILSTTPGNNYASFNGTSMAAPHVAGAAALIKAKYPSMTNVQIRERLKNTATNLGDPFFYGKGVINVESALQ

SEQ ID NO: 69137 - protein, 275 aa, Bacillus sp. LG1
AQTVPWGIPHIKADKAHAAGVTGSGVKVAILDTGIDANHADLNVKGGASFVSGEPNALQDGNGHGTHVAGTVAALNNTTGVLGVAYNADLYAVKVLSASGSGTLSGIAQGIEWSISNGMNVINMSLGGSSGSTALQQACNNAYNRGIVVIAAAGNSGSSGNRNTMGYPARYSSVIAVGAVSSNNTRASFSSVGSELEVMAPGVNMLSTTPGNNYASFNGTSMAAPHVAGAAALIKAKYPSMTNVQIRERLKNTATNLGDPFFYGKGVINVESALQ

SEQ ID NO: 69138 - protein, 275 aa, Bacillus sp. LG1
AQTVPWGIPHIKADKAHAAGVTGSGVKVAILDTGIDANHADLNVKGGASFVSGEPNALQDGNGHGTHVAGTVAALNNTTGVLGVAYNADLYAVKVLSASGSGTLSGIAQGIEWSISNGMNVINMSLGGSSGSTALQQACNNAYNRGIVVIAAAGNSGSSGNRNTMGYPARYSSVIAVGAVSSNNTRASFSSVGSELEVMAPGVNIKSTTPGNNYASFNGTSMAAPHVAGAAALIKAKYPSMTNVQIRERLKNTATNLGDPFFYGKGVINVESALQ

SEQ ID NO: 69139 - protein, 275 aa, Bacillus sp. LG1
AQTVPWGIPHIKADKAHAAGVTGSGVKVAILDTGIDANHADLNVKGGASFVSGEPNALQDGNGHGTHVAGTVAALNNTTGVLGVAYNADLYAVKVLSASGSGTLSGIAQGIEWSISNGMNVINMSLGGSSGSTALQQACNNAYNRGIVVIAAAGNSGSSGNRNTMGYPARYSSVIAVGAVSSNNTRASFSSVGSELEVMAPGVNILSTTPGNNYASFNGTSMAAPHVAGAAALIKAKYPSMTNVQIRERLKNTATQLGDPFFYGKGVINVESALQ

SEQ ID NO: 69140 - protein, 332 aa, Unidentified
EETKKTYLIGFDAQEEVETFTNIVDSEIGALSEEDIDITYEFKDIPVVSAEMSDEEYAALLEDPSISYIEEDIEVTTMAQTIPWGISQISAPEAQIAGFTGEGVNVAVLDTGIEDHPDLNVQGGVSFVQGEPDYQDGNGHGTHVAGTIAALDNDEGVIGVAPNADLYAVKVLGANGSGSVSSIAQGLEWAGENGMDIANLSLGSSAPSATLEQAVDEATANGVLVVAASGNSGASSIGYPARYDNAMAVGATDQSDSLANFSQYGEGLDIVAPGVGIDSTYTGSSYDSLSGTSMATPHVAGSAALVKEKNPLWSNEQIRAHLNETATDLGDT

SEQ ID NO: 69141 - protein, 275 aa, Bacillus pumilus
AQSVPYGISQIKAPALHSQGYTGSNVKVAVIDSGIDSSHPDLNVRGGASFVPSETNPYQDGSSHGTHVAGTIAALNNSIGVLGVAPSASLYAVKVLDSTGSGQYSWIINGIEWAISNNMDVINMSLGGPTGSTALKTVVDKAVSSGIVVAAAAGNEGSSGSTSTVGYPAKYPSTIAVGAVNSANQRASFSSAGSELDVMAPGVSIQSTLPGGTYGAYNGTSMATPHVAGAAALILSKHPTWTNAQVRDRLESTATYLGSSFYYGKGLINVQAAAQ

SEQ ID NO: 69142 - protein, 275 aa, Bacillus subtilis
AQSVPYGISQIKAPALHSQGYTGSNVKVAVIDSGIDSSHPDLNVRGGASFVPSETNPYQDGSSHGTHVAGTIAALNNTIGVLGVAPNASLYAVKVLDSTGSGQYSWIINGIEWAISNNMDVINMSLGGPSGSTALKTVVDKAVSSGIVVAAAAGNEGSSGSTSTVGYPAKYPSTIAVGAVNSSNQRASFSSAGSELDVMAPGVSIQSTLPGGTYGAYNGTSMATPHVAGAAALILSKHPTWTNAQVRDRLESTATYLGNSFYYGKGLINVQAAAQ

SEQ ID NO: 69143 - protein, 275 aa, Bacillus subtilis
AQSVPYGISQIKAPALHSQGYTGSNVKVAVIDSGIDSSHPDLNVRGGASFVPSETNPYQDGSSHGTHVAGTIAALDNSIGVLGVAPSASLYAVKVLDSTGSGQYSWIINGIEWAISNNMDVINMSLGGPTGSTALKTVVDKAVSSGIVVAAAAGNEGSSGSTSTVGYPAKYPSTIAVGAVNSSNQRASFSSAGSELDVMAPGVSIQSTLPGGTYGAYNGTSMATPHVAGAAALILSKHPTWTNAQVRDRLESTATYLGNSFYYGKGLINVQAAAQ

SEQ ID NO: 69144 - protein, 275 aa, Bacillus subtilis
AQVVPYGISQIKAPALHSQGYTGSNVKVAVIDSGIDSSHPDLNVRGGASFVPSETNPYQDGSSHGTHVAGTIAALDNSIGVLGVAPSASLYAVKVLDSTGSGQYSWIINGIEWAISNNMDVINMSLGGPTGSTALKTVVDKAVSSGIVVAAAAGNEGSSGSTSTVGYPAKYPSTIAVGAVNSSNQRASFSSAGSELDVMAPGVSIQSTLPGGTYGAYNGTSMATPHVAGAAALILSKHPTWTNAQVRDRLESTATYLGPSFYYGKGLINVQAAAQ

SEQ ID NO: 69145 - protein, 275 aa, Bacillus subtilis
AQSVPYGISQIKAPALHSQGYTGSNVKVAVIDSGIDSSHPDLNVRGGASFVPSETNPYQDGSSHGTHVAGTIAALNNSIGVLGVAPSASLYAVKVLDSTGSGQYSWIINGIEWAISNNMDVINMSLGGPTGSTALKTVVDKAVSSGIVVVAAAGNFGSSGSTSTVGYPAKYPSTIAVGAVNSSNQRASFSSAGSELDVMAPGVSIQSTLPGGTYGAYNGTSMATPHVAGAAALILSKHPTWTNAQVRDRLESTATYLGNSFYYGKGLINVQAAAQ

SEQ ID NO: 69146 - protein, 275 aa, Bacillus subtilis
AQSVPYGISQIKAPALHSQGYTGSNVKVAVIDSGIDSSHPDLNVRGGASFVPSETNPYQDGSSHGTHVAGTIAALNNSIGVLGVAPSASLYAVKVLDSTGSGQYSWIINGIEWAISNNMDVINMSLGGPTGSTALKTVVDKAVSSGIVVAAAAGNEGSSGSTSTVGYPAKYPSTIAVGAVNSSNQRASFSSAGSELDVMAPGVSIQSTLPGGTYGAYNGTSMATPHVAGAAALILSKHPTWTNAQVRDRLESTATYLGSSFYYGKGLINVQAAAQ

SEQ ID NO: 69147 - protein, 275 aa, Bacillus subtilis
AQSVPYGIEQIKAPALHSQGYTGSNVKVAVIDSGIDSSHPDLNVRGGASFVPSETNPYQDGSSHGTHVAGTIAALDNNIGVLGVAPSASLYAVKVLDSTGSGQYSWIINGIEWAISNNMDVINMSLGGPTGSTALKTVVDKAVSSGIVVAAAAGNEGSSGSTSTVGYPAKYPSTIAVGAVNSSNQRASFSSAGSELDVMAPGVSIQSTLPGGTYGAYNGTSMATPHVAGAAALILSKHPTWTNAQVRDRLESTATYLGNSFYYGKGLINVQAAAQ

SEQ ID NO: 69148 - protein, 274 aa, Bacillus sp. LG1
QTVPWGIPHIKADKAHAAGVTGSGVKVAILDTGIDANHADLNVKGGASFVSGEPNALQDGNGHGTHVAGTVAALNNTTGVLGVAYNADLYAVKVLSASGSGTLSGIAQGIEWSISNGMNVINMSLGGSSGSTALQQACNNAYNRGIVVIAAAGNSGSSGNRNTMGYPARYSSVIAVGAVSSNNTRASFSSVGSELEVMAPGVNILSTTPGNNYASFNGTSMAAPHVAGAAALIKAKYPSMTNVQIRERLKNTATNLGDPFFYGKGVINVESALQ

SEQ ID NO: 69149 - protein, 275 aa, Bacillus subtilis
AQSVPYGISQIKAPALHSQGYTGSNVKVAVIDSGIDSSHPDLNVRGGASFVPSETNPYQDGSSHGTHVAGTIAALNNSIGVLGVAPSASLYAVKVLDSTGSGQYSWIINGIEWAISNNMDVINMSLGGPTGSTALKTVVDKAVSSGIVVAAAAGNEGSSGSTSTVGYPAKYPSTIAVGAVNSSNQRASFSSVGSELDVMAPGVSIQSTLPGGTYGAYNGTSMATPHVAGAAALILSKHPTWTNAQVRDRLESTATYLGNSFYYGKGLINVQAAAQ

SEQ ID NO: 69150 - protein, 275 aa, Bacillus subtilis
AQSVPYGISQIKAPALHSQGYTGSNVKVAVIDSGIDSSHPDLNVRGGASFVPSETNPYEDGSSHGTHVAGTIAALNNSIGVLGVAPSASLYAVKVLDSTGSGQYSWIINGIEWAISNNMDVINMSLGGPTGSTALKTVVDKAVSSGIVVAAAAGNEGSSGSTSTVGYPAKYPSTIAVGAVNSSNQRASFSSVGSELDVMAPGVSIQSTLPGGTYGAYNGTSMATPHVAGAAALILSKHPTWTNAQVRDRLESTATYLGNSFYYGKGLINVQAAAQ

SEQ ID NO: 69151 - protein, 275 aa, Bacillus subtilis
AQSVPYGISQIKAPALHSQGYTGSNVKVAVIDSGIDSSHPDLNVRGGASFVPSETNPYQDGSSHGTHVAGTIAALNNSIGVLGVAPSASLYAVKVLDSTGSGQYSWIINGIEWAISNNMDVINMSLGGPTGSTALKTVVDKAVSSGIVVVAAAGNEGSSGSTSTVGYPAKYPSTIAVGAVNSSNQRASFSSAGSELDVMAPGVSIQSTLPGGTYGAYNGTSMATPHVAGAAALILSKHPTWTNAQVRDRLESTATYLGNSFYYGKGLINVQAAAQ

SEQ ID NO: 69152 - protein, 274 aa, Bacillus sp.
QTVPWGIPHIKADKAHAAGVTGSGVKVAVLDTGIDANHVDLNVKGGASFVSGEPNALQDGNGHGTHVAGTVAALDNDTGVLGVAYNADLYAVKVLSASGSGELSGIAQGIEWSISNGMNVINMSLGGSSGSTALQQACNNAYNRGIVVIAAAGNSGSSGNRNTMSYPARYSSVIAVGAVSSNNQRASFSSVGSELEVMAPGVNILSTTPGNNYASRNGTSMAAPHVAGAAALIKAKYPSMTNVQIRERLKNTATNLGDPFFYGKGVINVESALQ

SEQ ID NO: 69153 - protein, 275 aa, Bacillus subtilis
AQSVPYGISQIKAPALHSQGYTGSNVKVAVIDSGIDSSHPDLNVRGGASFVPSETNPYQDGSSHGTHVAGTIAALDNSIGVLGVAPSASLYAVKVLDSTGSGQYSWIINGIEWAISNNMDVINMSLGGPTGSTALKTVVDKAVSSGIVVAAAAGNEGSSGSTSTVGYPAKYPSTIAVGAVNSSNQRASFSSAGSELDVMAPGVSIQSTLPGGTYGAYNGTSMATPHVAGAAALILSKHPTWTNAQVRDRLESTATYLGPSFYYGKGLINVQAAAQ

SEQ ID NO: 69154 - protein, 275 aa, Bacillus subtilis
AQSVPYGIEQIKAPALHSQGYTGSNVKVAVIDSGIDSSHPDLNVRGGASFVPSETNPYQDGSSHGTHVAGTIAALDNSIGVLGVAPSASLYAVKVLDSTGSGQYSWIINGIEWAISNNMDVINMSLGGPTGSTALKTVVDKAVSSGIVVAAAAGNEGSSGSTSTVGYPAKYPSTIAVGAVNSSNQRASFSSAGSELDVMAPGVSIQSTLPGGTYGAYNGTSMATPHVAGAAALILSKHPTWTNAQVRDRLESTATYLGNSFYYGKGLINVQAAAQ

SEQ ID NO: 69155 - protein, 275 aa, Bacillus subtilis
AQSVPYGISQIKAPALHSQGYTGSNVKVAVIDSGIDSSHPDLNVRGGASFVPSETNPYQDGASHGTHVAGTIAALNNSIGVLGVAPSASLYAVKVLDSTGSGQYSWIINGIEWAISNNMDVINMSLGGPTGSTALKTVVDKAVSSGIVVAAAAGNEGSSGSTSTVGYPAKYPSTIAVGAVDSSNQRASFSSVGSELDVMAPGVSIQSTLPGGTYGAKSGTSMATPHVAGAAALILSKHPTWTNAQVRDRLESTATYLGPSFYYGKGLINVQAAAQ

SEQ ID NO: 69156 - protein, 274 aa, Bacillus amyloliquefaciens
AQSVPYGVSQIKAPALHSQGYTGSNVKVAVIDSGIDSSHPDLKVAGGASMVPSETNPFQDNNSHGTHVAGTVAALNNSIGVLGVAPSASLYAVKVLSSGSGQYSWIINGIEWAIANNMDVINMSLGGPSGSAALKAAVDKAVASGVVVVAAAGNEGTSGSSSTVGYPGKYPSVIAVGAVDSSNQRASFSSVGPELDVMAPGVSIQSTLPGNKYGALNGTSMASPHVAGAAALILSKHPNWTNTQVRSSLENTTTKLGDSFYYGKGLINVQAAAQ

SEQ ID NO: 69157 - protein, 275 aa, Bacillus subtilis
AQVVPYGISQIKAPALHSQGYTGSNVKVAVIDSGIDSSHPDLNVRGGASFVPSETNPYQDGSSHGTHVAGTIAALDNNIGVLGVAPSASLYAVKVLDSTGSGQYSWIINGIEWAISNNMDVINMSLGGPTGSTALKTVVDKAVSSGIVVAAAAGNEGSSGSTSTVGYPAKYPSTIAVGAVNSSNQRASFSSAGSELDVMAPGVSIQSTLPGGTYGAYNGTSMATPHVAGAAALILSKHPTWTNAQVRDRLESTATYLGNSFYYGKGLINVQAAAQ

SEQ ID NO: 69158 - protein, 275 aa, Bacillus subtilis
AQSVPYGIEQIKAPALHSQGYTGSNVKVAVIDSGIDSSHPDLNVRGGASFVPSETNPYQDGSSHGTHVAGTIAALDNSIGVLGVAPSASLYAVKVLDSTGSGQYSWIINGIEWAISNNMDVINMSLGGPTGSTALKTVVDKAVSSGIVVAAAAGNEGSSGSTSTVGYPAKYPSTIAVGAVNSSNQRASFSSAGSELDVMAPGVSIQSTLPGGTYGAYNGTSMATPHVAGAAALILSKHPTWTNAQVRDRLESTATYLGPSFYYGKGLINVQAAAQ

SEQ ID NO: 69159 - protein, 274 aa, Bacillus sp.
QTVPWGIPHIKADKAHAAGVTGSGVKVAILDTGIDANHADLNVKGGASFVSGEPNALQDGNGHGTHVAGTVAALDNTTGVLGVAPSVSLYAVKVLGASGSGSVSSIAQGLEWAGNNGMHVANLSLGSPSPSATLEQAVNSATSRGVLVVAASGNSGTSGNRNTMDYPARYSSVIAVGAVSSNNTRASFSSVGSELEVMAPGVNILSTYPGSTYATLNGTSMATPHVAGAAALIKAKYPSMTNVQIRNRLKNTATNLGDPFFYGKGVINVESALQ

SEQ ID NO: 69160 - protein, 275 aa, Bacillus subtilis
AQSVPYGISQIKAPALHSQGYTGSNVKVAVIDSGIDSSHPDLNVRGGASFVPSETNPYQDGSSHGTHVAGTIAALNNSIGVLGVAPSASLYAVKVLDSTGSGRYSWIINGIEWAISNNMDVINMSLGGPTGSTALKTVVDKAVSSGIVVVAAAGNEGSSGSTSTVGYPAKYPSTIAVGAVNSSNQRASFSSAGSELDVMAPGVSIQSTLPGGTYGAYNGTSMATPHVAGAAALILSKHPTWTNAQVRDRLESTATYLGNSFYYGKGLINVQAAAQ

SEQ ID NO: 69161 - protein, 275 aa, Bacillus subtilis
AQSVPYGISQIKAPALHSQGYTGSNVKVAVIDSGIDSSHPDLNVRGGASFVPSETNPYQDGSSHGTHVAGTIAALNNSIGVLGVAPSASLYAVKVLDSTGSGGYSWIINGIEWAISNNMDVINMSLGGPTGSTALKTVVDKAVSSGIVVAAAAGNEGSSGSTSTVGYPAKYPSTIAVGAVNSSNQRASFSSVGSELDVMAPGVSIQSTLPGGTYGAYNGTSMATPHVAGAAALILSKHPTWTNAQVRDRLESTATYLGNSFYYGKGLINVQAAAQ

SEQ ID NO: 69162 - protein, 275 aa, Bacillus subtilis
AQSVPYGISQIKAPALHSQGYTGSNVKVAVIDSGIDSSHPDLNVRGGASFVPSETNPYQDGSSHGTHVAGTIAALNNSIGVLGVAPSASLYAVKVLGSTGSGQYSWIINGIEWAISNNMDVINMSLGGPTGSTALKTVVDKAVSSGIVVVAAAGNEGSSGSTSTVGYPAKYPSTIAVGAVNSSNQRASFSSAGSELDVMAPGVSIQSTLPGGTYGAYNGTSMATPHVAGAAALILSKHPTWTNAQVRDRLESTATYLGNSFYYGKGLINVQAAAQ

SEQ ID NO: 69163 - protein, 275 aa, Bacillus subtilis
AQSVPYGISQIKAPALHSQGYTGSNVKVAVIDSGIDSSHPDLNVRGGASFVPSETNPYQDGSSHGTHVAGTIAALDNNIGVLGVAPSASLYAVKVLDSTGSGQYSWIINGIEWAISNNMDVINMSLGGPTGSTALKTVVDKAVSSGIVVAAAAGNEGSSGSTSTVGYPAKYPSTIAVGAVNSSNQRASFSSAGSELDVMAPGVSIQSTLPGGTYGAYNGTSMATPHVAGAAALILSKHPTWTNAQVRDRLESTATYLGPSFYYGKGLINVQAAAQ

SEQ ID NO: 69164 - protein, 275 aa, Bacillus subtilis
AQSVPYGISQIKAPALHSQGYTGSNVKVAVIDSGIDSSHPDLNVRGGASFVPSETNPYQDGSSHGTHVAGTIAALNNSIGVLGVAPSASLYAVKVLDSTGSGQYSWIINGIEWAISNNMDVINMSLGGPTGSTALKTVVDKAVSSGIVVAAAAGNEGSSGSTSTVGYPAKYPSTIAVGAVNSSNQRASFSSVGSELDVMAPGVSIQSTLPGGTYGAKNGTSMATPHVAGAAALILSKHPTWTNAQVRDRLESTATYLGNSFYYGKGLINVQAAAQ

SEQ ID NO: 69165 - protein, 275 aa, Bacillus subtilis
AQSVPYGISQIKAPALHSQGYTGSNVKVAVIDSGIDSSHPDLNVRGGASFVPSETNPYGDGSSHGTHVAGTIAALNNSIGVLGVAPSASLYAVKVLDSTGSGQYSWIINGIEWAISNNMDVINMSLGGPTGSTALKTVVDKAVSSGIVVAAAAGNEGSSGSTSTVGYPAKYPSTIAVGAVNSSNQRASFSSVGSELDVMAPGVSIQSTLPGGTYGAYNGTSMATPHVAGAAALILSKHPTWTNAQVRDRLESTATYLGNSFYYGKGLINVQAAAQ

SEQ ID NO: 69166 - protein, 275 aa, Bacillus subtilis
AQVVPYGIEQIKAPALHSQGYTGSNVKVAVIDSGIDSSHPDLNVRGGASFVPSETNPYQDGSSHGTHVAGTIAALDNSIGVLGVAPSASLYAVKVLDSTGSGQYSWIINGIEWAISNNMDVINMSLGGPTGSTALKTVVDKAVSSGIVVAAAAGNEGSSGSTSTVGYPAKYPSTIAVGAVNSSNQRASFSSAGSELDVMAPGVSIQSTLPGGTYGAYNGTSMATPHVAGAAALILSKHPTWTNAQVRDRLESTATYLGNSFYYGKGLINVQAAAQ

SEQ ID NO: 69167 - protein, 275 aa, Bacillus subtilis
AQVVPYGISQIKAPALHSQGYTGSNVKVAVIDSGIDSSHPDLNVRGGASFVPSETNPYQDGSSHGTHVAGTIAALDNSIGVLGVAPSASLYAVKVLDSTGSGQYSWIINGIEWAISNNMDVINMSLGGPTGSTALKTVVDKAVSSGIVVAAAAGNEGSSGSTSTVGYPAKYPSTIAVGAVNSSNQRASFSSAGSELDVMAPGVSIQSTLPGGTYGAYNGTSMATPHVAGAAALILSKHPTWTNAQVRDRLESTATYLGNSFYYGKGLINVQAAAQ

SEQ ID NO: 69168 - protein, 275 aa, Bacillus subtilis
AQSVPYGISQIKAPALHSQGYTGSNVKVAVIDSGIDSSHPDLNVRGGASFVPSETNPYQDGSSHGTHVAGTIAALNNSIGVLGVAPSASLYAVKVLDSTGSGQYSWIINGIEWAISNNMDVINMSLGGPTGSTALKTVVDKAVSSGIVVAAAAGNEGSSGSTSTVGYPAKYPSTIAVGAVNSSNQRASFSSAGSELDVMAPGVSIQSTLPGGTYGALNGTSMATPHVAGAAALILSKHPTWTNAQVRDRLESTATYLGNSFYYGKGLINVQAAAQ

SEQ ID NO: 69169 - protein, 275 aa, Bacillus subtilis
AQSVPYGISQIKAPALHSQGYTGSNVKVAVIDSGIDSSHPDLNVRGGASFVPSETNPYQDGSSHGTHVAGTIAALDNNIGVLGVAPSASLYAVKVLDSTGSGQYSWIINGIEWAISNNMDVINMSLGGPTGSTALKTVVDKAVSSGIVVAAAAGNEGSSGSTSTVGYPAKYPSTIAVGAVNSSNQRASFSSAGSELDVMAPGVSIQSTLPGGTYGAYNGTSMATPHVAGAAALILSKHPTWTNAQVRDRLESTATYLGNSFYYGKGLINVQAAAQ

SEQ ID NO: 69170 - protein, 379 aa, Unidentified
VGKLVVGLVCVTALVTVTDSASAAEEKVKYLIGFEEEAELEAFTEEIDQVGVFSVEEQSVAEDTLDIDVDIIDEYDYIDVLAVELDPEDVDALSEEAGISFIEEDIELSIQQTVPWGITRVQAPAVHNRGVTGSGVRVAILDSGISTHSDLTIRGGASFVPGEPTTADLNGHGTHVAGTVAALNNSIGVIGVAPSADLYAVKVLGANGRGSVSGIAQGLEWAAANNMHIANMSLGSDAPSITLERAVNYATSQGVLVIAATGNNGSGSVGYPARYANAMAVGATDQNNRRANFSQYGTGIDIVAPGVNVQSTYPGNRYASLNGTSMATPHVAGAAALVKQRYPSWNATQIRNHLKNTATNLGNSSQFGSGLVNAEAATR

SEQ ID NO: 69171 - protein, 379 aa, Unidentified
VGKLVVGLVCVTALVTVTDSASAAEEKVKYLIGFEEEAELEAFTEEIDQVGVFSVEEQSVAEDTLDIDVDIIDEYDYIDVLAVELDPEDVDALSEEAGISFIEEDIELSIQQTVPWGITRVQAPAVHNRGVTGSGVRVAILDSGISTHSDLTIRGGASFVPGEPTTADLNGHGTHVAGTVAALNNSIGVIGVAPSADLYAVKVLGANGRGSVSGIAQGLEWAAANNMHIANMSLGSDAPSTTLERAVNYATSQGVLVIAATGNNGSGSVGYPARYANAMAVGATDQNNRRANFSQYGTGIDIVAPGVNVQSTYPGNRYASLNGTSMATPHVAGAAALVKQRYPSWNATQIRNHLKNTATNLGNSSQFGSGLVNAEAATR

SEQ ID NO: 69172 - protein, 273 aa, Bacillus sp.
AQTVPWGIPHIKADKAHAAGVTGSGVKVAILDTGIDANHADLNVKGGASFVSGEPNALQDGNGHGTHVAGTVAALDNTTGVLGVAYNADLYAVKVLSASGSGTLSGIAQGIEWSISNRMNVINMSLGGVQGSTALQQACNNAYNRGIVVIAAAGNSGSSGNRNTMDYPARYSSVIAVGAVSSNNTRASFSSVGSELEVMAPGVNILSTTPGNNYASFNGTSMAAPHVAGAAALIKAKYPSMTNVQIRNRLKNTATNLGDPFFYGKGVINVESA

SEQ ID NO: 69173 - protein, 274 aa, Bacillus subtilis
AQSVPYGISQIKAPALHSQGYTGSNVKVAVIDSGIDSSHPDLNVRGGASFVPSETNPYQDGSSHGTHVAGTIAALNNSIGVLGVAPSASLYAVKVLDSTGSGQYSWIINGIEWAISNNMDVINMSLGGPTGSTALKTVVDKAVSSGIVVAAAAGNEGSSGSTSTVGYPAKYPSTIAVGAVNSSDQRASFSSVGSELDVMAPGVSIQSTLPGGTYGAYNGTSMATPHVAGAAALILSKHPTWTNAQVRDRLESTATYLGNSFYYGKGLINVQAAA

SEQ ID NO: 69174 - protein, 274 aa, Bacillus subtilis
AQSVPYGISQIKAPALHSQGYTGSNVKVAVIDSGIDSSHPDLNVRGGASFVPSETNPYQDGSSHGTHVAGTIAALNNSIGVLGVAPSASLYAVKVLDSTGSGQYSWIINGIEWAISNNMDVINMSLGGPTGSTALKTVVDKAVSSGIVVAAAAGNEGSSGSTSTVGYPAKYPSTIAVGAVNSSNQRASFSSAGSELDVMAPGVSIQSTLPGGTYGAYNGTSMATPHVAGAAALILSKHPTWTNAQVRDRLESTATYLGSSFYYGKGLINVQAAA

SEQ ID NO: 69175 - protein, 378 aa, Unidentified
VGKLVVGLVCVTALVTVTDSASAAEEKVKYLIGFEEEAELEAFTEEIDQVGVFSVEEQSVAEDTLDIDVDIIDEYDYIDVLAVELDPEDVDALSEEAGISFIEEDIELSIQQTVPWGITRVQAPAVHNRGVTGSGVRVAILDSGISTHSDLTIRGGASFVPGEPTTADLNGHGTHVAGTVAALNNSIGVIGVAPSADLYAVKVLGANGRGSVSGIAQGLEWAAANNMHIANMSLGSDAPSTTLERAVNYATSQGVLVIAATGNNGSGSVGYPARYANAMAVGATDQNNRRANFSQYGTGIDIVAPGVNVQSTYPGNRYASLNGTSMATPHVAGAAALVKQRYPSWNATQIRNHLKNTATNLGNSSQFGSGLVNAEAAT

SEQ ID NO: 69176 - protein, 275 aa, Bacillus sp. LG1
AQTVPWGIPHIKADKAHAAGVTGSGVKVAILDTGIDANHADLNVKGGASFVSGEPNALQDGNGHGTHVAGTVASLNNTTGVLGVAYNADLYAVKVLSASGSGTLSGIAQGIEWSISNGMNVINMSLGGSSGSTALQQACNNAYNRGIVVIAAAGNSGSSGNRNTMGYPARYSSVIAVGAVSSNNTRASFSSVGSELEVMAPGVNILSTTPGNNYASFNGTSMAAPHVAGAAALIKAKYPSMTNVQIRERLKNTATNLGDPFFYGKGVINVESALQ

SEQ ID NO: 69177 - protein, 275 aa, Bacillus sp. LG1
AQTVPWGIPHIKADKAHAAGVTGSGVKVAILDTGIDANHADLNVKGGASFVSGEPNALQDGNGHGTHVAGTVAALNNTTGVLGVAYNADLYAVKVLSASGSGTLSGIAQGIEWSISNGMNVINMSLGGSSGSTALQQACNNAYNRGIVVIAAAGNSGTSGNRNTMGYPARYSSVIAVGAVSSNNTRASFSSVGSELEVMAPGVNILSTTPGNNYASFNGTSMAAPHVAGAAALIKAKYPSMTNVQIRERLKNTATNLGDPFFYGKGVINVESALQ

SEQ ID NO: 69178 - protein, 275 aa, Bacillus sp. LG1
AQTVPWGIPHIKADKAHAAGVTGSGVKVAILDTGIDANHADLNVKGGASFVSGEPNALQDGNGHGTHVAGTVAALNNTTGVLGVAYNADLYAVKVLSASGSGTLSGIAQGIEWSISNGMNVINMSLGGSSGSTALQQACNNAYNRGIVVIAAAGNSGSSGNRNTMGYPARYSSVIAVGAVSSNNTRASFSSVGSELEVMAPGVNILSTTPGNNYASFNGTSMAAPHVAGAAALIKAKYPSMTNVQIRERLKNTATNLGDPFFYGKGVINVASALQ

SEQ ID NO: 69179 - protein, 275 aa, Bacillus sp. LG1
AQTVPWGIPHIKADKAHAAGVTGSGVKVAILDTGIDANHADLNVKGGASFVSGEPNALQDGNGHGTHVAGTVAALNNTTGVLGVAYNADLYAVKVLSAKGSGTLSGIAQGIEWSISNGMNVINMSLGGSSGSTALQQACNNAYNRGIVVIAAAGNSGSSGNRNTMGYPARYSSVIAVGAVSSNNTRASFSSVGSELEVMAPGVNILSTTPGNNYASFNGTSMAAPHVAGAAALIKAKYPSMTNVQIRERLKNTATNLGDPFFYGKGVINVESALQ

SEQ ID NO: 69180 - protein, 275 aa, Bacillus sp. LG1
AQTVPWGIPHIKADKAHAAGVTGSGVKVAILDTGIDANHADLNVKGGASFVSGEPNALQDGNGHGTHVAGTGAALNNTTGVLGVAYNADLYAVKVLSASGSGTLSGIAQGIEWSISNGMNVINMSLGGSSGSTALQQACNNAYNRGIVVIAAAGNSGSSGNRNTMGYPARYSSVIAVGAVSSNNTRASFSSVGSELEVMAPGVNILSTTPGNNYASFNGTSMAAPHVAGAAALIKAKYPSMTNVQIRERLKNTATNLGDPFFYGKGVINVESALQ

SEQ ID NO: 69181 - protein, 275 aa, Bacillus sp. LG1
AQTVPWGIPHIKADKAHAAGVTGSGVKVAILDTGIDANHADLNVKGGASFVSGEPNALQDGNGHGTHVAGTVAALNNTTGVLGVAYNADLYAVKVLSASGSGTLSGIAQGIEWSISNGMNVINMSLGGSSGSTALQQACNNAYNRGIVVIAAAGNSGSSGNRNTMGYPARYSSVIAVGAVSSNNTRASFSSVGSELEVMAPGVNILSTTPGNNYASFNGTSMAAPHVAGAAALIKAKYHSMTNVQIRERLKNTATNLGDPFFYGKGVINVESALQ

SEQ ID NO: 69182 - protein, 275 aa, Bacillus sp. LG1
AQTVPWGIPHIKADKAHAAGVTGSGVKVAILDTGIDANHADLNVKGGASFVSGEPNALQDGNGHGTHVAGTVAALNNTTGVLGVAYNADLYAVKVLSASGSGTLSGIAQGIEWSISNGMNVINMSLGGSSGSTALQQACNNAYNRGIVVIAAAGNSGSSGNRDTMGYPARYSSVIAVGAVSSNNTRASFSSVGSELEVMAPGVNILSTTPGNNYASFNGTSMAAPHVAGAAALIKAKYPSMTNVQIRERLKNTATNLGDPFFYGKGVINVESALQ

SEQ ID NO: 69183 - protein, 275 aa, Bacillus sp. LG1
AQTVPWGIPHIKADKAHAAGVTGSGVKVAILDTGIDANHADLNVKGGASFVSGEPNALQDGNGHGTHVAGTVAALNNTTGVLGVAYNADLYAVKVLSASGSGTLSGIAQGIEWSISNGMNVINMSLGGSSGSTALQQACNNAYNRGIVVIAAAGNSGSSGNRNTMGYPARYSSVIAVGAVSSNNTRASFSSVGSELEVMAPGVNILSTTPGNNYASFNGTSMAAPHVAGAAAGIKAKYPSMTNVQIRERLKNTATNLGDPFFYGKGVINVESALQ

SEQ ID NO: 69184 - protein, 275 aa, Bacillus sp. LG1
AQTVPWGIPHIKADKAHAAGVTGSGVKVAILDTGIDANHADLNVKGGASFVSGEPNALQDGNGHGTHVAGTVAALNNTTGVLGVAYNADLYAVKVLSASGSGTLSGIAQGIEWSISNGMNAINMSLGGSSGSTALQQACNNAYNRGIVVIAAAGNSGSSGNRNTMGYPARYSSVIAVGAVSSNNTRASFSSVGSELEVMAPGVNILSTTPGNNYASFNGTSMAAPHVAGAAALIKAKYPSMTNVQIRERLKNTATNLGDPFFYGKGVINVESALQ

SEQ ID NO: 69185 - protein, 275 aa, Bacillus sp. LG1
AQTVPWGIPHIKADKAHAAGVTGSGVKVAILDTGIDANHADLNVKGGASFVSGEPNALQDGNGHGTHVAGTVAALNNTTGVLGVAYNADLYAVNVLSASGSGTLSGIAQGIEWSISNGMNVINMSLGGSSGSTALQQACNNAYNRGIVVIAAAGNSGSSGNRNTMGYPARYSSVIAVGAVSSNNTRASFSSVGSELEVMAPGVNILSTTPGNNYASFNGTSMAAPHVAGAAALIKAKYPSMTNVQIRERLKNTATNLGDPFFYGKGVINVESALQ

SEQ ID NO: 69186 - protein, 275 aa, Bacillus sp. LG1
AQTVPWGIPHIKADKAHAAGVTGSGVKVAILDTGIDANHADLNVKGGASFVSGEPNALQDGPGHGTHVAGTVAALNNTTGVLGVAYNADLYAVKVLSASGSGTLSGIAQGIEWSISNGMNVINMSLGGSSGSTALQQACNNAYNRGIVVIAAAGNSGSSGNRNTMGYPARYSSVIAVGAVSSNNTRASFSSVGSELEVMAPGVNILSTTPGNNYASFNGTSMAAPHVAGAAALIKAKYPSMTNVQIRERLKNTATNLGDPFFYGKGVINVESALQ

SEQ ID NO: 69187 - protein, 275 aa, Bacillus sp. LG1
AQTVPWGIPHIKADKAHAAGVTGSGVKVSILDTGIDANHADLNVKGGASFVSGEPNALQDGNGHGTHVAGTVAALNNTTGVLGVAYNADLYAVKVLSASGSGTLSGIAQGIEWSISNGMNVINMSLGGSSGSTALQQACNNAYNRGIVVIAAAGNSGSSGNRNTMGYPARYSSVIAVGAVSSNNTRASFSSVGSELEVMAPGVNILSTTPGNNYASFNGTSMAAPHVAGAAALIKAKYPSMTNVQIRERLKNTATNLGDPFFYGKGVINVESALQ

SEQ ID NO: 69188 - protein, 275 aa, Bacillus sp. LG1
AQTVPWGIPHIKADKAHAAGVTGSGVKVAILDTGIDANHADLNVKGGASFVSGEPNALQDYNGHGTHVAGTVAALNNTTGVLGVAYNADLYAVKVLSASGSGTLSGIAQGIEWSISNGMNVINMSLGGSSGSTALQQACNNAYNRGIVVIAAAGNSGSSGNRNTMGYPARYSSVIAVGAVSSNNTRASFSSVGSELEVMAPGVNILSTTPGNNYASFNGTSMAAPHVAGAAALIKAKYPSMTNVQIRERLKNTATNLGDPFFYGKGVINVESALQ

SEQ ID NO: 69189 - protein, 275 aa, Bacillus sp. LG1
AQTVPWGIPHIKADKAHAAGVTGSGVKVAILDTGIDANHADLNVKGGASFVSGEPNALQDGNGHGTHVAGTVAALNNTTGVLGVAYNADLYAVKVLSASGSGTLSGIAQGIEWSISNGMNVMNMSLGGSSGSTALQQACNNAYNRGIVVIAAAGNSGSSGNRNTMGYPARYSSVIAVGAVSSNNTRASFSSVGSELEVMAPGVNILSTTPGNNYASFNGTSMAAPHVAGAAALIKAKYPSMTNVQIRERLKNTATNLGDPFFYGKGVINVESALQ

SEQ ID NO: 69190 - protein, 275 aa, Bacillus sp. LG1
AQTVPWGIPHIKADKAHAAGVTGSGVKVAILDTGIDANHADLNVKMGASFVSGEPNALQDGNGHGTHVAGTVAALNNTTGVLGVAYNADLYAVKVLSASGSGTLSGIAQGIEWSISNGMNVINMSLGGSSGSTALQQACNNAYNRGIVVIAAAGNSGSSGNRNTMGYPARYSSVIAVGAVSSNNTRASFSSVGSELEVMAPGVNILSTTPGNNYASFNGTSMAAPHVAGAAALIKAKYPSMTNVQIRERLKNTATNLGDPFFYGKGVINVESALQ

SEQ ID NO: 69191 - protein, 275 aa, Bacillus sp. LG1
AQTVPWGIPHIKADKAHAAGVTGSGVKVAILDTGIDANHADLNVKGGASFVSGEPNALQDGNGHGTHVAGTVAALNNTTGVLGVAYNADLYAVKVLSASGSGTLSGIAQGIEWSISNGMNVINMSLGGSSGSAALQQACNNAYNRGIVVIAAAGNSGSSGNRNTMGYPARYSSVIAVGAVSSNNTRASFSSVGSELEVMAPGVNILSTTPGNNYASFNGTSMAAPHVAGAAALIKAKYPSMTNVQIRERLKNTATNLGDPFFYGKGVINVESALQ

SEQ ID NO: 69192 - protein, 275 aa, Bacillus sp. LG1
ASTVPWGIPHIKADKAHAAGVTGSGVKVAILDTGIDANHADLNVKGGASFVSGEPNALQDGNGHGTHVAGTVAALNNTTGVLGVAYNADLYAVKVLSASGSGTLSGIAQGIEWSISNGMNVINMSLGGSSGSTALQQACNNAYNRGIVVIAAAGNSGSSGNRNTMGYPARYSSVIAVGAVSSNNTRASFSSVGSELEVMAPGVNILSTTPGNNYASFNGTSMAAPHVAGAAALIKAKYPSMTNVQIRERLKNTATNLGDPFFYGKGVINVESALQ

SEQ ID NO: 69193 - protein, 275 aa, Bacillus sp. LG1
AQTVPWGIPHIKADKAHAAGVTGSGVKVAILDTGIDANHADLNVKGGASFVSGEPNALQDGNGHGTHVAGTVAALNNTTGVLGVAYNADLYAVKVLSASGSGTLSGIAQGIEWSISNGMNVINMSLGGSSGSTALQQACNNAYNRGIVVIAAAFNSGSSGNRNTMGYPARYSSVIAVGAVSSNNTRASFSSVGSELEVMAPGVNILSTTPGNNYASFNGTSMAAPHVAGAAALIKAKYPSMTNVQIRERLKNTATNLGDPFFYGKGVINVESALQ

SEQ ID NO: 69194 - protein, 275 aa, Bacillus sp. LG1
AQTVPWGIPHIKADKAHAAGVTGSGVKVAILDTGIDANHADLNVKGGASFVSGHPNALQDGNGHGTHVAGTVAALNNTTGVLGVAYNADLYAVKVLSASGSGTLSGIAQGIEWSISNGMNVINMSLGGSSGSTALQQACNNAYNRGIVVIAAAGNSGSSGNRNTMGYPARYSSVIAVGAVSSNNTRASFSSVGSELEVMAPGVNILSTTPGNNYASFNGTSMAAPHVAGAAALIKAKYPSMTNVQIRERLKNTATNLGDPFFYGKGVINVESALQ

SEQ ID NO: 69195 - protein, 275 aa, Bacillus sp. LG1
AQTVPWGIPHSKADKAHAAGVTGSGVKVAILDTGIDANHADLNVKGGASFVSGEPNALQDGNGHGTHVAGTVAALNNTTGVLGVAYNADLYAVKVLSASGSGTLSGIAQGIEWSISNGMNVINMSLGGSSGSTALQQACNNAYNRGIVVIAAAGNSGSSGNRNTMGYPARYSSVIAVGAVSSNNTRASFSSVGSELEVMAPGVNILSTTPGNNYASFNGTSMAAPHVAGAAALIKAKYPSMTNVQIRERLKNTATNLGDPFFYGKGVINVESALQ

SEQ ID NO: 69196 - protein, 275 aa, Bacillus sp. LG1
AQTVPWGIPHIKADKAHAAGVTGSGVKVAILDTGIDANHADLNVKGGASFVSGEPNALQDGNGHGTHVAGTVAALNNTTGVLGVAYNADLYAVKVLSASGSGTLSGIAQGIEWSISNGMNVINMSLGGSSGSTALQQACNNAYNRGIVVIAAAGNSGSSGNRNTMGYPARYSSVIAVGAVSSNNTRASFSSVGSELEVMAPGVNILSTTPGNNYASFNGTSMAAPHVAGAAALIKAKYPSMTNVQIRERLKNTATNLDDPFFYGKGVINVESALQ

SEQ ID NO: 69197 - protein, 275 aa, Bacillus sp. LG1
AQTVPWGIPHIKADKAHAAGVTGSGVKVAILDTGIDANHADLNVKGGASFVSGEPNALQDGNGHGTHVAGTVAALNNTTGVLGVAYNADLYAVKVLSASGSGTLSGIAQGIEWSISNGMNVINMSLGGSSGSTALQQACNNAYNRGIVVIAAAGNSGSSGNRNTMGYPARYSSVIAVGAVSSNNTRASFSSVGSELEVMAPGVNILTTTPGNNYASFNGTSMAAPHVAGAAALIKAKYPSMTNVQIRERLKNTATNLGDPFFYGKGVINVESALQ

SEQ ID NO: 69198 - protein, 275 aa, Bacillus sp. LG1
AQTVPWGIPHIKADKAHAAGVTGSGVKVAILDTGIDANHADLNVKGGASFVSGEPNALQDGNGHGTHVAGTVAALNNTTGVLGVAYNADLYAVKVLSASGSGTLSGIAQGIEWSISNGMNVINMSLGGSSGSTALQQACNNAYNRGIVVIAAAGNSGSSGNRNTMGYPARYSSVIAVGAVSSNNTRASFSSVGSELEVMAPGVNILSTTPGNNYLSFNGTSMAAPHVAGAAALIKAKYPSMTNVQIRERLKNTATNLGDPFFYGKGVINVESALQ

SEQ ID NO: 69199 - protein, 275 aa, Bacillus sp. LG1
AQTVPWGIPHIKADKAHAAGVTGSGVKVAILDTGIDANHADLNVKGGASFVSGEPNALQDGNGHGTHVAGTVAALNNTTGVLGVAYNADLYAVKVLSASGSGTLSGIAQGIEWSISNGMNVINMSLGGSSGSTALQQACNNAYNRGIVVIAAAGNSGSSGNRNTMGYPARYSSVIAVGAVSSNNTRASFSSVGSELEVMAPGVNILSTTPGNNYDSFNGTSMAAPHVAGAAALIKAKYPSMTNVQIRERLKNTATNLGDPFFYGKGVINVESALQ

SEQ ID NO: 69200 - protein, 275 aa, Bacillus sp. LG1
AQTVPWGIPHIKADKAHAAGVTGSGVKVAILDTGIDANHADLNVKGGASFVSGEPNALQDGNGHGTHVAGTVAALNNTTGVLGVAYNADLYAVKVLSASGSGTLSGIAQGIEWSISNGMNVINMSLGGSSGSTALQQACNNAYNRGIVVIAAAGNSGSSGNRNTMAYPARYSSVIAVGAVSSNNTRASFSSVGSELEVMAPGVNILSTTPGNNYASFNGTSMAAPHVAGAAALIKAKYPSMTNVQIRERLKNTATNLGDPFFYGKGVINVESALQ

SEQ ID NO: 69201 - protein, 275 aa, Bacillus sp. LG1
AQTVPWGIPHIKADKAHAAGVTGSGVKVAILDTGIDANHADLNVKGGASFVSGEPNALQDGNGHGTHVAGTVAALNNTTGVLGVAYNADLYAVKVLSASGSETLSGIAQGIEWSISNGMNVINMSLGGSSGSTALQQACNNAYNRGIVVIAAAGNSGSSGNRNTMGYPARYSSVIAVGAVSSNNTRASFSSVGSELEVMAPGVNILSTTPGNNYASFNGTSMAAPHVAGAAALIKAKYPSMTNVQIRERLKNTATNLGDPFFYGKGVINVESALQ

SEQ ID NO: 69202 - protein, 275 aa, Bacillus sp. LG1
AQTVPWGIPHIKADKAHAAGVTGSGVKVAILDTGIDANHADLNVKGGASFVSGEPNALQDGNGHGTHVAGTVAALNNTTGVLGVAYNADLYAVKVLSASGSGTLSGIAQGIEWSISNGMNVINMSLGGSSGSTALQQACNNAYNRGIMVIAAAGNSGSSGNRNTMGYPARYSSVIAVGAVSSNNTRASFSSVGSELEVMAPGVNILSTTPGNNYASFNGTSMAAPHVAGAAALIKAKYPSMTNVQIRERLKNTATNLGDPFFYGKGVINVESALQ

SEQ ID NO: 69203 - protein, 275 aa, Bacillus sp. LG1
AQTVPWGIPHIKADKAHAAGVTGSGVKVAILDTGIDANHADLNVKGGASFVSGDPNALQDGNGHGTHVAGTVAALNNTTGVLGVAYNADLYAVKVLSASGSGTLSGIAQGIEWSISNGMNVINMSLGGSSGSTALQQACNNAYNRGIVVIAAAGNSGSSGNRNTMGYPARYSSVIAVGAVSSNNTRASFSSVGSELEVMAPGVNILSTTPGNNYASFNGTSMAAPHVAGAAALIKAKYPSMTNVQIRERLKNTATNLGDPFFYGKGVINVESALQ

SEQ ID NO: 69204 - protein, 274 aa, Bacillus amyloliquefaciens
AQSVPYGVSQIKAPALHSQGYTGSNVKVAVIDSGIDSSHPDLKVAGGASMVPGESAFQDNNSHGTHVAGTVAALNNSIGVLGVAPSVSLYAVKVLGADGSGQYSWIINGIEWAIANNMDVINMSLGGPSGSAALKAAVDKAVASGVVVVAAAGNEGTSGSSSTVGYPGKYPSVIAVGAVDSSNQRASFSSVGPELDVMAPGVSIQSTLPGNKYGALNGTSMASPHVAGAAALILSKHPNWTNTQVRSSLENTTTKLGDSFYYGKGLINVQAAAQ

SEQ ID NO: 69205 - protein, 275 aa, Bacillus sp. LG1
AQTVPWGIPHIKADKAHAAGVTGSGVKVAILDTGIDANHADLNVKGGASFVSGEPNALQDGNGHGTHVAGTVAALNNTTGVLGVAYNADLYAVKVLSASGSGTLSGIAQGIEWSISNGMNVINMSLGGSSGSTALQQACNNAYNRGIVVIAAAGNSGSSGNRNTMGYPARYSSVIAVGAVSSNNTRASFSSVGSELEVMAPGVNILSTTPGNNYASFNGTSMAAPHVAGAAALIKAKYPSMTNVQIRERLKNTATNLGDPFFYGKGVINWESALQ

SEQ ID NO: 69206 - protein, 275 aa, Bacillus sp. LG1
AQTVPWGIPHIKADKAHAAGVTGSGVKVAILDTGIDANHADLNVKGGAGFVSGEPNALQDGNGHGTHVAGTVAALNNTTGVLGVAYNADLYAVKVLSASGSGTLSGIAQGIEWSISNGMNVINMSLGGSSGSTALQQACNNAYNRGIVVIAAAGNSGSSGNRNTMGYPARYSSVIAVGAVSSNNTRASFSSVGSELEVMAPGVNILSTTPGNNYASFNGTSMAAPHVAGAAALIKAKYPSMTNVQIRERLKNTATNLGDPFFYGKGVINVESALQ

SEQ ID NO: 69207 - protein, 275 aa, Bacillus sp. LG1
AQTVPWGIPHIKADKAHAAGVTGSGVMVAILDTGIDANHADLNVKGGASFVSGEPNALQDGNGHGTHVAGTVAALNNTTGVLGVAYNADLYAVKVLSASGSGTLSGIAQGIEWSISNGMNVINMSLGGSSGSTALQQACNNAYNRGIVVIAAAGNSGSSGNRNTMGYPARYSSVIAVGAVSSNNTRASFSSVGSELEVMAPGVNILSTTPGNNYASFNGTSMAAPHVAGAAALIKAKYPSMTNVQIRERLKNTATNLGDPFFYGKGVINVESALQ

SEQ ID NO: 69208 - protein, 275 aa, Bacillus sp. LG1
AQTVPWGIPHIKADKAHAAGVTGSGVKVAILDTGIDANHADLNVKGGASFVSGEPNALQDGNGHGTHVAGTTAALNNTTGVLGVAYNADLYAVKVLSASGSGTLSGIAQGIEWSISNGMNVINMSLGGSSGSTALQQACNNAYNRGIVVIAAAGNSGSSGNRNTMGYPARYSSVIAVGAVSSNNTRASFSSVGSELEVMAPGVNILSTTPGNNYASFNGTSMAAPHVAGAAALIKAKYPSMTNVQIRERLKNTATNLGDPFFYGKGVINVESALQ

SEQ ID NO: 69209 - protein, 275 aa, Bacillus sp. LG1
AQTVPWGIPHIKADKAHAAGVTGSGVKVAILDTGIDANHADLNVKGGASFVSGEPNALQDGNGHGTHVAGTVAALNNTTGVLGVAYNADLYAVKVLSASGSGTLSGIAQGIEWSISNGMNVINMSLGGSSGSTALQQACNNAYNRGIVVIAAAGNSGSSGNRNTMGYPARYSSVIAVGAVSSNNTRASFSSVGSELEVMAPGVNILSTTPGNNYASFNGTSMAAPHVAGAAALIKADYPSMTNVQIRERLKNTATNLGDPFFYGKGVINVESALQ

SEQ ID NO: 69210 - protein, 275 aa, Bacillus sp. LG1
AQTVPWGIPHIKADKAHAAGVTGSGVKVAILDTGIDWNHADLNVKGGASFVSGEPNALQDGNGHGTHVAGTVAALNNTTGVLGVAYNADLYAVKVLSASGSGTLSGIAQGIEWSISNGMNVINMSLGGSSGSTALQQACNNAYNRGIVVIAAAGNSGSSGNRNTMGYPARYSSVIAVGAVSSNNTRASFSSVGSELEVMAPGVNILSTTPGNNYASFNGTSMAAPHVAGAAALIKAKYPSMTNVQIRERLKNTATNLGDPFFYGKGVINVESALQ

SEQ ID NO: 69211 - protein, 275 aa, Bacillus sp. LG1
AQTVPWGIPHIKADKAHAAGVTGSGVKVAILDTGIDANHADLNVKGGASFVSGEPNALQDGNGHGTHVAGTVAALNNTTGVLGVAYNADLYAVKVLSASGSGTLSGIAQGIEWSISNGMNGINMSLGGSSGSTALQQACNNAYNRGIVVIAAAGNSGSSGNRNTMGYPARYSSVIAVGAVSSNNTRASFSSVGSELEVMAPGVNILSTTPGNNYASFNGTSMAAPHVAGAAALIKAKYPSMTNVQIRERLKNTATNLGDPFFYGKGVINVESALQ

SEQ ID NO: 69212 - protein, 275 aa, Bacillus sp. LG1
AQTVPWGIPHIKADKAHAAGVTGSGVKVAILDTGIDANHADLNVKEGASFVSGEPNALQDGNGHGTHVAGTVAALNNTTGVLGVAYNADLYAVKVLSASGSGTLSGIAQGIEWSISNGMNVINMSLGGSSGSTALQQACNNAYNRGIVVIAAAGNSGSSGNRNTMGYPARYSSVIAVGAVSSNNTRASFSSVGSELEVMAPGVNILSTTPGNNYASFNGTSMAAPHVAGAAALIKAKYPSMTNVQIRERLKNTATNLGDPFFYGKGVINVESALQ

SEQ ID NO: 69213 - protein, 275 aa, Bacillus sp. LG1
AQTVPWGIPHIKADKAHAAGVTGSGVKVAILDTGIDANHADLNVKGGASFVSGEPNALQDGNGHGTHVAGTVAALNNTTGVLGVAYNADLYAVKVLSASGSGTLSGIAQGIEWSISNGMNVINMSLGGSSGSTALQQACNNAYNRGIVVIAAAGNSGSSGNRNTMGYPARYSSVIAVGAVSSNNTRASFSSVGSELEVMAPGVNILSTTPGNNYASFNGTSMAAPHVAGAALLIKAKYPSMTNVQIRERLKNTATNLGDPFFYGKGVINVESALQ

SEQ ID NO: 69214 - protein, 275 aa, Bacillus sp. LG1
AQTVPWGIPHIKADKAHAAGVTGSGVKVAILDTGIDANHADLNVKGGASFVSGEPNALQDGNGHGTHVAGTVAALNNKTGVLGVAYNADLYAVKVLSASGSGTLSGIAQGIEWSISNGMNVINMSLGGSSGSTALQQACNNAYNRGIVVIAAAGNSGSSGNRNTMGYPARYSSVIAVGAVSSNNTRASFSSVGSELEVMAPGVNILSTTPGNNYASFNGTSMAAPHVAGAAALIKAKYPSMTNVQIRERLKNTATNLGDPFFYGKGVINVESALQ

SEQ ID NO: 69215 - protein, 275 aa, Bacillus sp.
AQTVPWGIPHIKADKAHAAGVTGSGVKVAILDTGIDANHADLNVKGGASFVSGEPNALQDGNGHGTHVAGTVAALNNTTGVLGVAYNADLYAVKVLSASGSGTLSGIAQGIEWSISNGMNVINMSLGVMHGSTALQQACNNAYNRGIVVIAAAGNSGSSGNRNTMGYPARYSSVIAVGAVSSNNTRASFSSVGSELEVMAPGVNILSTTPGNNYASRNGTSMAAPHVAGAAALIKAKYPSMTNVQIRNRLKNTATNLGDPFFYGKGVINVESALQ

SEQ ID NO: 69216 - protein, 275 aa, Bacillus sp. LG1
AQTVPWGIPHIKADKAHAAGVTGSGVKVAILDTGIDANHADLNVKGGAQFVSGEPNALQDGNGHGTHVAGTVAALNNTTGVLGVAYNADLYAVKVLSASGSGTLSGIAQGIEWSISNGMNVINMSLGGSSGSTALQQACNNAYNRGIVVIAAAGNSGSSGNRNTMGYPARYSSVIAVGAVSSNNTRASFSSVGSELEVMAPGVNILSTTPGNNYASFNGTSMAAPHVAGAAALIKAKYPSMTNVQIRERLKNTATNLGDPFFYGKGVINVESALQ

SEQ ID NO: 69217 - protein, 275 aa, Bacillus sp. LG1
AQTVPWGIPHIKADKAHAAGVTGSGVKVAILDTGIDANHADLNVKGGASFVSGEPNALQDGNGHGTHVAGTVAALNNTTGVLGVAYNADLYAVKVLSASGSGTLSGIAQGIEWSISNGMNVINMSLGGSSGSTALQQACNNAYNRGIVVIAAAGNSGSSGNRNTMGYPARYSSVIAVGAVSSNNTRASFSSVGSELEVMAPGVNILSTTPGNNYASFNGTSMAAPHVAGAAAMIKAKYPSMTNVQIRERLKNTATNLGDPFFYGKGVINVESALQ

SEQ ID NO: 69218 - protein, 275 aa, Bacillus sp. LG1
AQTVPWGIPHIKADKAHAAGVTGSGVKVAILDTGIDANHADLNVKGGASFVSGEPNALQDGNGHGTHVAGTVAALNNTTGVLGVAYNADLYAVKVLSASGSGTLSGIAQGIEWSISNGMNVINMSLGGSSGSTALQQACNNAYNRGIVVIAAALNSGSSGNRNTMGYPARYSSVIAVGAVSSNNTRASFSSVGSELEVMAPGVNILSTTPGNNYASFNGTSMAAPHVAGAAALIKAKYPSMTNVQIRERLKNTATNLGDPFFYGKGVINVESALQ

SEQ ID NO: 69219 - protein, 275 aa, Bacillus sp. LG1
AQTVPWGIPHIKADKAHAAGVTGSGVKVAILDTGIDANHADLNVKGGASFVSGEPNALQDGNGHGTHQAGTVAALNNTTGVLGVAYNADLYAVKVLSASGSGTLSGIAQGIEWSISNGMNVINMSLGGSSGSTALQQACNNAYNRGIVVIAAAGNSGSSGNRNTMGYPARYSSVIAVGAVSSNNTRASFSSVGSELEVMAPGVNILSTTPGNNYASFNGTSMAAPHVAGAAALIKAKYPSMTNVQIRERLKNTATNLGDPFFYGKGVINVESALQ

SEQ ID NO: 69220 - protein, 275 aa, Bacillus sp. LG1
AQTVPWGIPHIKADKAHAAGVTGSGVKVAILDTGIDANHADLNVKGGASFVSGEPNALQDGNGHGTYVAGTVAALNNTTGVLGVAYNADLYAVKVLSASGSGTLSGIAQGIEWSISNGMNVINMSLGGSSGSTALQQACNNAYNRGIVVIAAAGNSGSSGNRNTMGYPARYSSVIAVGAVSSNNTRASFSSVGSELEVMAPGVNILSTTPGNNYASFNGTSMAAPHVAGAAALIKAKYPSMTNVQIRERLKNTATNLGDPFFYGKGVINVESALQ

SEQ ID NO: 69221 - protein, 275 aa, Bacillus sp. LG1
AQTVPWGIPHIKADKAHAAGVTGSGVKVAILDTGIDANHADLNVKGGASFVSGEPNALQDGNGHGTHVAGTVAALNNTTGVLGVAYNADLYAVKVLSASGSGTLSGIAQGIEWSISNGMNVINMSLGGSSGSTALQQACNNAYNRGIVVIAAAGNSGSSGNRNTMGYPARYSSVIAVGAVSSNNTRASFSSVGSELEVMAPGVNILSTTPGNNYASFNGTSMAAPHVAGAAALIKASYPSMTNVQIRERLKNTATNLGDPFFYGKGVINVESALQ

SEQ ID NO: 69222 - protein, 275 aa, Bacillus sp. LG1
AQTVPWGIPHIKADKAHAAGVTGSGVKVAILDTGIDANHADLNVKGGASFVSGEPNALQDGNGHGTHVAGTVAALNNTTGVLGVAYNADLYAVKVLSASGSGTLSGIAQGIEWSISNGMNSINMSLGGSSGSTALQQACNNAYNRGIVVIAAAGNSGSSGNRNTMGYPARYSSVIAVGAVSSNNTRASFSSVGSELEVMAPGVNILSTTPGNNYASFNGTSMAAPHVAGAAALIKAKYPSMTNVQIRERLKNTATNLGDPFFYGKGVINVESALQ

SEQ ID NO: 69223 - protein, 275 aa, Bacillus sp. LG1
AQTVPWGIPHIKADKAHAAGVTGSGVKVAILDTGIDTNHADLNVKGGASFVSGEPNALQDGNGHGTHVAGTVAALNNTTGVLGVAYNADLYAVKVLSASGSGTLSGIAQGIEWSISNGMNVINMSLGGSSGSTALQQACNNAYNRGIVVIAAAGNSGSSGNRNTMGYPARYSSVIAVGAVSSNNTRASFSSVGSELEVMAPGVNILSTTPGNNYASFNGTSMAAPHVAGAAALIKAKYPSMTNVQIRERLKNTATNLGDPFFYGKGVINVESALQ

SEQ ID NO: 69224 - protein, 275 aa, Bacillus sp. LG1
AQTVPWGIPHIKADKAHAAGVTGSGVKVAILDTGIDANHADLNVKGGASFVSGEPNALQDGNGHGTHVAGTVAALNNTTGVLGVAYNADLYAVKVLSASGSGTLSGIAQGIEWSISNGMNVINMSLGGSSGSTALQQACNNAYNRGIVQIAAAGNSGSSGNRNTMGYPARYSSVIAVGAVSSNNTRASFSSVGSELEVMAPGVNILSTTPGNNYASFNGTSMAAPHVAGAAALIKAKYPSMTNVQIRERLKNTATNLGDPFFYGKGVINVESALQ

SEQ ID NO: 69225 - protein, 275 aa, Bacillus sp. LG1
AQTVPWGIPHIKADKAHAAGVTGSGVKVAILDTGIDANHADLNVKGGASFVSGEPNALQDGNGHGTHVAGTVAALNNTTGVLGVAYNADLYAVKVLSASGSGTLSGIAQGIEWSISNGMNVINMSLGGSSGSTALQQACNNAYNRGIVVIAAAGNSGSSGNRNTMGYPARYSSVIAVGAVSSNNTRASFSSVGSELEVMAPGVNILSTTPGNNYASFNGTSMAAPHVAGAAALIKAKYPSMTNVQIRERLKNTATNLGDPFFYGKGVIVVESALQ

SEQ ID NO: 69226 - protein, 275 aa, Bacillus sp. LG1
AQTVPWGVPHIKADKAHAAGVTGSGVKVAILDTGIDANHADLNVKGGASFVSGEPNALQDGNGHGTHVAGTVAALNNTTGVLGVAYNADLYAVKVLSASGSGTLSGIAQGIEWSISNGMNVINMSLGGSSGSTALQQACNNAYNRGIVVIAAAGNSGSSGNRNTMGYPARYSSVIAVGAVSSNNTRASFSSVGSELEVMAPGVNILSTTPGNNYASFNGTSMAAPHVAGAAALIKAKYPSMTNVQIRERLKNTATNLGDPFFYGKGVINVESALQ

SEQ ID NO: 69227 - protein, 275 aa, Bacillus sp. LG1
AQTVPWGIPHIKADKAHAAGVTGSGVKVAILDTGIDANHADLNVKGGASFVSGEPNALQDGNGHGTHVAGTVAALNNTTGVLGVAYNADLYAVKVLSASGSGTLSGIAQGIEWSISMGMNVINMSLGGSSGSTALQQACNNAYNRGIVVIAAAGNSGSSGNRNTMGYPARYSSVIAVGAVSSNNTRASFSSVGSELEVMAPGVNILSTTPGNNYASFNGTSMAAPHVAGAAALIKAKYPSMTNVQIRERLKNTATNLGDPFFYGKGVINVESALQ

SEQ ID NO: 69228 - protein, 275 aa, Bacillus sp. LG1
AQTVPWGIPHIKADKAHAAGVTGSGVKVAILDTGIDANHADLNVKGGASFVSGEPNALQDGNGHGTHVAGTVAALNNTTGVLGVAYNADLYAVKVLSASGSGTLSGIAQGIEWSISNGMNVINMSLGGSSGSTALQQACNNAYNRGIVVIAAAGNSGSSGNRNTMGYPARYSSVIAVGAVSSNNTRASFSSVGSELEVMAPGVNILSTTPGNNYASFNGTSMAAPHVAGAAANIKAKYPSMTNVQIRERLKNTATNLGDPFFYGKGVINVESALQ

SEQ ID NO: 69229 - protein, 275 aa, Bacillus sp. LG1
AQTVPWGIPHIKADKAHAAGVTGSGVKVAILDTGIDANHADLNVKGGASFVSGEPNALQDGNGHGTHVAGTVAALNNTTGVLGVAYNADLYAVKVLSASGSGTLSGIAQGIEWSISNGMNVINMSLGGSSGSTALQQACNNAYNRGIVVIAAAGNSGSSGNRNTMGYPARYSSVIAVGAVSSNNTRASFSSVGSELEVMAPGVNILSTTPGNNYASFNGTSMAAPHVAGAAALIKAKYPSMTNVQIRERLKNTAHNLGDPFFYGKGVINVESALQ

SEQ ID NO: 69230 - protein, 275 aa, Bacillus sp. LG1
AQTVPWGIPHIKADKAHAAGVTGSGVKVAILDTGIDANHADLNVKGGASFVSGEPNALQDGNGHGTTVAGTVAALNNTTGVLGVAYNADLYAVKVLSASGSGTLSGIAQGIEWSISNGMNVINMSLGGSSGSTALQQACNNAYNRGIVVIAAAGNSGSSGNRNTMGYPARYSSVIAVGAVSSNNTRASFSSVGSELEVMAPGVNILSTTPGNNYASFNGTSMAAPHVAGAAALIKAKYPSMTNVQIRERLKNTATNLGDPFFYGKGVINVESALQ

SEQ ID NO: 69231 - protein, 275 aa, Bacillus sp. LG1
AQTVPWGIPHIKADKAHAAGVTGSGVKSAILDTGIDANHADLNVKGGASFVSGEPNALQDGNGHGTHVAGTVAALNNTTGVLGVAYNADLYAVKVLSASGSGTLSGIAQGIEWSISNGMNVINMSLGGSSGSTALQQACNNAYNRGIVVIAAAGNSGSSGNRNTMGYPARYSSVIAVGAVSSNNTRASFSSVGSELEVMAPGVNILSTTPGNNYASFNGTSMAAPHVAGAAALIKAKYPSMTNVQIRERLKNTATNLGDPFFYGKGVINVESALQ

SEQ ID NO: 69232 - protein, 275 aa, Bacillus sp. LG1
AQTVPWGIPHIKADKAHAAGVTGSGVKVAILDTGIDANHADLNVKGGASFVSGEPNALQDGNGHGTHVAGTVAARNNTTGVLGVAYNADLYAVKVLSASGSGTLSGIAQGIEWSISNGMNVINMSLGGSSGSTALQQACNNAYNRGIVVIAAAGNSGSSGNRNTMGYPARYSSVIAVGAVSSNNTRASFSSVGSELEVMAPGVNILSTTPGNNYASFNGTSMAAPHVAGAAALIKAKYPSMTNVQIRERLKNTATNLGDPFFYGKGVINVESALQ

SEQ ID NO: 69233 - protein, 275 aa, Bacillus sp. LG1
AQTVPWGIPHIKADKAHAAGVTGSGVKVAILDTGIDANHADLNVKGGASFVSGEPNALQDGNGHGTHVAGTVAALNNTTGVLGVAYNADLYAVKVLSASGSGTLSGIAQGIEWSISNGMNVINMSLGGSSGSTALQQACNNAYNRGIVVIAAAGNSGSSGNRNTMGYPARYSSVIAVGAVSSNNTRASFSSVGSELEVMAPGVNILSTTPGNNYASFNGTSMAAPHVAGAAALIKAKYPSMTNVQIRERLKNTATNLGDPFFYGKGVINQESALQ

SEQ ID NO: 69234 - protein, 275 aa, Bacillus sp. LG1
AQTVPWGIPHIKADKAHAAGVTGSGVKVAILDTGIDANHADLNVKGGASFVSDEPNALQDGNGHGTHVAGTVAALNNTTGVLGVAYNADLYAVKVLSASGSGTLSGIAQGIEWSISNGMNVINMSLGGSSGSTALQQACNNAYNRGIVVIAAAGNSGSSGNRNTMGYPARYSSVIAVGAVSSNNTRASFSSVGSELEVMAPGVNILSTTPGNNYASFNGTSMAAPHVAGAAALIKAKYPSMTNVQIRERLKNTATNLGDPFFYGKGVINVESALQ

SEQ ID NO: 69235 - protein, 275 aa, Bacillus sp. LG1
AQTVPWGIPHIKADKAHAAGVTGSGVKVAILDTGIDANHADLNVKGGASFVSGEPNALQDGNGHGTHVAGTVAALNNTTGVLGVAYNADLYAVKVLSASGSGTLSGIAQGIEWSISNGMNVINMSLGGSSGSTALQQACNNAYNRGIVVIAAAGNSGSSGNRNTMGYPARYSSVIAVGAVSSNNTRASFSSVGSELEVMAPGVNILSTTPGNNYASFNGTSMAAPHVAGAAALNKAKYPSMTNVQIRERLKNTATNLGDPFFYGKGVINVESALQ

SEQ ID NO: 69236 - protein, 275 aa, Bacillus sp. LG1
AQTVPWGIAHIKADKAHAAGVTGSGVKVAILDTGIDANHADLNVKGGASFVSGEPNALQDGNGHGTHVAGTVAALNNTTGVLGVAYNADLYAVKVLSASGSGTLSGIAQGIEWSISNGMNVINMSLGGSSGSTALQQACNNAYNRGIVVIAAAGNSGSSGNRNTMGYPARYSSVIAVGAVSSNNTRASFSSVGSELEVMAPGVNILSTTPGNNYASFNGTSMAAPHVAGAAALIKAKYPSMTNVQIRERLKNTATNLGDPFFYGKGVINVESALQ

SEQ ID NO: 69237 - protein, 275 aa, Bacillus sp. LG1
AQTVPWGIPHIKADKAHAAGVTGSGVKVAILDTGIDANHADLNVKGGASFVSGEPNALQDGNGHGTHVAGTVAALNNTTGVLGVAYNADLYAVKVLSASGSGTLSGIAQGIEWSISNGMNVINMSLGGSSGSTALQQACNNAYNRGIVVIAAAGNSGSDGNRNTMGYPARYSSVIAVGAVSSNNTRASFSSVGSELEVMAPGVNILSTTPGNNYASFNGTSMAAPHVAGAAALIKAKYPSMTNVQIRERLKNTATNLGDPFFYGKGVINVESALQ

SEQ ID NO: 69238 - protein, 275 aa, Bacillus sp. LG1
AQTVPWGIPHIKADKAHAAGVTGSGVKVAILDTGIDANHADLMVKGGASFVSGEPNALQDGNGHGTHVAGTVAALNNTTGVLGVAYNADLYAVKVLSASGSGTLSGIAQGIEWSISNGMNVINMSLGGSSGSTALQQACNNAYNRGIVVIAAAGNSGSSGNRNTMGYPARYSSVIAVGAVSSNNTRASFSSVGSELEVMAPGVNILSTTPGNNYASFNGTSMAAPHVAGAAALIKAKYPSMTNVQIRERLKNTATNLGDPFFYGKGVINVESALQ

SEQ ID NO: 69239 - protein, 275 aa, Bacillus sp. LG1
AQTVPWGIPHIKADKAHAAGVTGSGVTVAILDTGIDANHADLNVKGGASFVSGEPNALQDGNGHGTHVAGTVAALNNTTGVLGVAYNADLYAVKVLSASGSGTLSGIAQGIEWSISNGMNVINMSLGGSSGSTALQQACNNAYNRGIVVIAAAGNSGSSGNRNTMGYPARYSSVIAVGAVSSNNTRASFSSVGSELEVMAPGVNILSTTPGNNYASFNGTSMAAPHVAGAAALIKAKYPSMTNVQIRERLKNTATNLGDPFFYGKGVINVESALQ

SEQ ID NO: 69240 - protein, 275 aa, Bacillus sp. LG1
AQTVPWGIPHIKADKAHAAGVTGSGVKVAILDTGIDANHADLNVKGGASFVSGEPNALQDGNGHGTHVAGTVAALNNTTGVLGVAYNADLYAVKVLSAVGSGTLSGIAQGIEWSISNGMNVINMSLGGSSGSTALQQACNNAYNRGIVVIAAAGNSGSSGNRNTMGYPARYSSVIAVGAVSSNNTRASFSSVGSELEVMAPGVNILSTTPGNNYASFNGTSMAAPHVAGAAALIKAKYPSMTNVQIRERLKNTATNLGDPFFYGKGVINVESALQ

SEQ ID NO: 69241 - protein, 275 aa, Bacillus sp. LG1
AQTVPWGIPHIKADKAHAAGVTGSGVKVAINDTGIDANHADLNVKGGASFVSGEPNALQDGNGHGTHVAGTVAALNNTTGVLGVAYNADLYAVKVLSASGSGTLSGIAQGIEWSISNGMNVINMSLGGSSGSTALQQACNNAYNRGIVVIAAAGNSGSSGNRNTMGYPARYSSVIAVGAVSSNNTRASFSSVGSELEVMAPGVNILSTTPGNNYASFNGTSMAAPHVAGAAALIKAKYPSMTNVQIRERLKNTATNLGDPFFYGKGVINVESALQ

SEQ ID NO: 69242 - protein, 275 aa, Bacillus sp. LG1
AQTVPWGIPHIKADKAHAAGVTGSGVKVAILDTGIDANHADLNVKGGASFVSGEPNALQDGNGHGTHVAGTVAALNNTTGVLGVAYNADLYAVKVLSASGSGTLSGIAQGIEWSISNGMNVINMSLGGSSGSTALQQACNNAYNRGIVVIAAAGNSGSSGNRNTMGYPARYSSVIAVGAVSSNNTRASLSSVGSELEVMAPGVNILSTTPGNNYASFNGTSMAAPHVAGAAALIKAKYPSMTNVQIRERLKNTATNLGDPFFYGKGVINVESALQ

SEQ ID NO: 69243 - protein, 275 aa, Bacillus sp. LG1
AQTVPWGIPHIKADKAHAAGVTGSGVKVAILDTGIDANHADLNVKGGASFVSGEPNALQDGNGHGTHVAGTVAALNNTTGVLGVAYNADLYAVKVLSASGSGTLSGIAQGIEWSISNGMNVINMSLGGSSGSTALQQACNNAYNRGIVVIAAAGNSGSSGNRNTMGYPARYSSVIAVGAVSSNNTRASDSSVGSELEVMAPGVNILSTTPGNNYASFNGTSMAAPHVAGAAALIKAKYPSMTNVQIRERLKNTATNLGDPFFYGKGVINVESALQ

SEQ ID NO: 69244 - protein, 275 aa, Bacillus sp. LG1
AQTVPWGIPHVKADKAHAAGVTGSGVKVAILDTGIDANHADLNVKGGASFVSGEPNALQDGNGHGTHVAGTVAALNNTTGVLGVAYNADLYAVKVLSASGSGTLSGIAQGIEWSISNGMNVINMSLGGSSGSTALQQACNNAYNRGIVVIAAAGNSGSSGNRNTMGYPARYSSVIAVGAVSSNNTRASFSSVGSELEVMAPGVNILSTTPGNNYASFNGTSMAAPHVAGAAALIKAKYPSMTNVQIRERLKNTATNLGDPFFYGKGVINVESALQ

SEQ ID NO: 69245 - protein, 275 aa, Bacillus sp. LG1
AQTVPWGIPHIKADKAHAAGVTGSGVKVAILDTGLDANHADLNVKGGASFVSGEPNALQDGNGHGTHVAGTVAALNNTTGVLGVAYNADLYAVKVLSASGSGTLSGIAQGIEWSISNGMNVINMSLGGSSGSTALQQACNNAYNRGIVVIAAAGNSGSSGNRNTMGYPARYSSVIAVGAVSSNNTRASFSSVGSELEVMAPGVNILSTTPGNNYASFNGTSMAAPHVAGAAALIKAKYPSMTNVQIRERLKNTATNLGDPFFYGKGVINVESALQ

SEQ ID NO: 69246 - protein, 275 aa, Bacillus sp. LG1
AQTVPWGIPHIKADKAHAAGVTGSGVKVAILDTGIDANHADLNVKGGASFVSGEPNALQDGNGHGTHVAGTVAAWNNTTGVLGVAYNADLYAVKVLSASGSGTLSGIAQGIEWSISNGMNVINMSLGGSSGSTALQQACNNAYNRGIVVIAAAGNSGSSGNRNTMGYPARYSSVIAVGAVSSNNTRASFSSVGSELEVMAPGVNILSTTPGNNYASFNGTSMAAPHVAGAAALIKAKYPSMTNVQIRERLKNTATNLGDPFFYGKGVINVESALQ

SEQ ID NO: 69247 - protein, 275 aa, Bacillus sp. LG1
AQTVPWGIPHIKADKAHAAGVTGSGVKVAILDTGIDANHADLNVKGGASFVSGEPNALQDGNGHGTHVAGTVAALNNTTGVLGEAYNADLYAVKVLSASGSGTLSGIAQGIEWSISNGMNVINMSLGGSSGSTALQQACNNAYNRGIVVIAAAGNSGSSGNRNTMGYPARYSSVIAVGAVSSNNTRASFSSVGSELEVMAPGVNILSTTPGNNYASFNGTSMAAPHVAGAAALIKAKYPSMTNVQIRERLKNTATNLGDPFFYGKGVINVESALQ

SEQ ID NO: 69248 - protein, 275 aa, Bacillus sp. LG1
AQTVPWGIPHIKADKAHAAGVTGSGVKVAILDTGIDANHADLNVKGGASFVSGEPNALQDGNGHGTHVAGTVAALNNTTGVLGVAYNADLYAVKVLSASGSGTLSGIAQGIEWSISNGMNVINMSLGGSSGSTALQQACNNAYNRGIVVIAAAGNSGSSGNRNTMGYPARYSSVIAVGAVSSNNTRASFSSVGSELEVMAPGVNILSTTPGNNYASFNGTSMAAPHVAGAAADIKAKYPSMTNVQIRERLKNTATNLGDPFFYGKGVINVESALQ

SEQ ID NO: 69249 - protein, 275 aa, Bacillus sp. LG1
AQTVPWGIPHIKADKAHAAGVTGSGVKVAILDTGIDANHADLNVKGGASFVSGEPNALQDGNGHGTHVAGTVAALNNTTGVLGVAYNADLYAVKVLSASGSGTLSGIAQGIEWSISNGFNVINMSLGGSSGSTALQQACNNAYNRGIVVIAAAGNSGSSGNRNTMGYPARYSSVIAVGAVSSNNTRASFSSVGSELEVMAPGVNILSTTPGNNYASFNGTSMAAPHVAGAAALIKAKYPSMTNVQIRERLKNTATNLGDPFFYGKGVINVESALQ

SEQ ID NO: 69250 - protein, 275 aa, Bacillus sp. LG1
AQTVPWGIPHIKADKAHAAGVTGSGVKVAILDTGIDANHADLNVKGGASFVSGEPNALQDGNGHGTHVAGTVAALNNTTGVLGVAYNADLYAVKVLSASGSGTLSGIAQGIEWSISNGMNVINMSLGGSSGSTALQQACNNAYNRGIVVIAAAGNSGSSGNRNTMGYPARYSSVIAVGAVSSNNTRASFSSVGSELEVMAPGVNILSTTPGNNYASFNGTSEAAPHVAGAAALIKAKYPSMTNVQIRERLKNTATNLGDPFFYGKGVINVESALQ

SEQ ID NO: 69251 - protein, 275 aa, Bacillus sp. LG1
AQTVPWGIPHIKADKAHAAGVTGSGVKVAILDTGIDANHADLNVKGGASFVSGEPNALQDGNGHGTHVAGTVAALNNTTGVLGVAYNADLYAVKVLSASGSGTLSGIAQGIEWSISNGMNVINMSLGGSSGSTALQQACNNAYNRGIVVIAAAGNSGSSGNRNTMGYPARYSSVQAVGAVSSNNTRASFSSVGSELEVMAPGVNILSTTPGNNYASFNGTSMAAPHVAGAAALIKAKYPSMTNVQIRERLKNTATNLGDPFFYGKGVINVESALQ

SEQ ID NO: 69252 - protein, 275 aa, Bacillus sp. LG1
AQTVPWGIPHIKADKAHAAGVTGSGVNVAILDTGIDANHADLNVKGGASFVSGEPNALQDGNGHGTHVAGTVAALNNTTGVLGVAYNADLYAVKVLSASGSGTLSGIAQGIEWSISNGMNVINMSLGGSSGSTALQQACNNAYNRGIVVIAAAGNSGSSGNRNTMGYPARYSSVIAVGAVSSNNTRASFSSVGSELEVMAPGVNILSTTPGNNYASFNGTSMAAPHVAGAAALIKAKYPSMTNVQIRERLKNTATNLGDPFFYGKGVINVESALQ

SEQ ID NO: 69253 - protein, 275 aa, Bacillus sp. LG1
AQTVPWGIPHIKADKAHAAGVTGSGVKVAILDTGIDANHADLNVKGGASFVSGEPNALQDGNGHGTHVAGTVAALNNTTGVLGVAYNADLYAVKVLSASGSGTLSGIAQGIEWSISNGMNVINMSLGGSSGSTALQQACNNAYNRGIVVIAAAGNSGSSGNRNTMGYPARYSSVIAVGAVSSNNTRASFSSVGSELEVMAPGVNILSTTPGNNYASFNGTSMAAPHVAGAAALIKANYPSMTNVQIRERLKNTATNLGDPFFYGKGVINVESALQ

SEQ ID NO: 69254 - protein, 275 aa, Bacillus sp. LG1
AQTVPWGIPHIKADKAHAAGVTGSGVKVAILDTGIDANHADLNVKGGASFVSGEPNALQDGNGHGTHVAGTVAALNNTTGVLGVAYNADLYAVKVLSASGSGTLSGIAQGIEWSISNGMNVINMSLGGSSGSTALQQACNNAYNRGIVVIAAAGNSGSSGNRNTMGYPARYSSVIAVGAVSSNNTRASFSSVGSELEVMAPGVNILSTTPGNNYASFNGTSMAAPHVAGAAALIKAKYPSMTNVQIRERLKNTATNLGDPFFYGKGVINVDSALQ

SEQ ID NO: 69255 - protein, 275 aa, Bacillus sp. LG1
AQTVPWGIPHIKADKAHAAGVTGSGVKVAILDTGIDANHADLNVKGGASFVSGEPNALQDGNGHGTHVAGTVAALNNTTGVLGVAYNADLYAVKVLSASGSGTLSGIAQGIEWSISNGMNVINMSLGGSSHSTALQQACNNAYNRGIVVIAAAGNSGSSGNRNTMGYPARYSSVIAVGAVSSNNTRASFSSVGSELEVMAPGVNILSTTPGNNYASFNGTSMAAPHVAGAAALIKAKYPSMTNVQIRERLKNTATNLGDPFFYGKGVINVESALQ

SEQ ID NO: 69256 - protein, 275 aa, Bacillus sp. LG1
AQTVPWGIPHIKADKAHAAGVTGSGVKVAILDTGIDANHADLNVKGGASFVSGEPNALQDGNGHGTHVAGTVAALNNTTGVLGVAYNADLYAVKVLSASGSGTLSGIAQGIEWSISNGMNVINMSLGGSSGSTALQQECNNAYNRGIVVIAAAGNSGSSGNRNTMGYPARYSSVIAVGAVSSNNTRASFSSVGSELEVMAPGVNILSTTPGNNYASFNGTSMAAPHVAGAAALIKAKYPSMTNVQIRERLKNTATNLGDPFFYGKGVINVESALQ

SEQ ID NO: 69257 - protein, 275 aa, Bacillus sp. LG1
AQTVPWGIPHIKADKAHAAGVTGSGVKVAILDTGIDANHADLNVKGGASFVSGEPNALQDGNGHGTHVAGTVAALNNTTGVLGVAYNADLYAVKVLSASGSGTLSGIAQGIEWSISNGMNVINMSLGGSHGSTALQQACNNAYNRGIVVIAAAGNSGSSGNRNTMGYPARYSSVIAVGAVSSNNTRASFSSVGSELEVMAPGVNILSTTPGNNYASFNGTSMAAPHVAGAAALIKAKYPSMTNVQIRERLKNTATNLGDPFFYGKGVINVESALQ

SEQ ID NO: 69258 - protein, 275 aa, Bacillus sp. LG1
AQTVPWGIPHIKADKAHAAGVTGSGVKVAILDTGIDANHADLNVKGGASFVSGEPNALQDGNGHGTHVAGTVAALNNTTGVLGVAYNADLYAVKVLSASGSGTLSGIAQGIEWSISNGMNVIDMSLGGSSGSTALQQACNNAYNRGIVVIAAAGNSGSSGNRNTMGYPARYSSVIAVGAVSSNNTRASFSSVGSELEVMAPGVNILSTTPGNNYASFNGTSMAAPHVAGAAALIKAKYPSMTNVQIRERLKNTATNLGDPFFYGKGVINVESALQ

SEQ ID NO: 69259 - protein, 275 aa, Bacillus sp. LG1
AQTVPWGIPHIKADKAHAAGVTGSGVKVAILDTGIDANHADLNVKGGASFVSGEPNALQDGNGHGTHVAGTVAALNNTTGVLGVAYNADLYAVKVLSASGSGTLSGIAQGIEWSISNGMNVINMSLGGSSGSTALQQACNNAYNRGIVVISAAGNSGSSGNRNTMGYPARYSSVIAVGAVSSNNTRASFSSVGSELEVMAPGVNILSTTPGNNYASFNGTSMAAPHVAGAAALIKAKYPSMTNVQIRERLKNTATNLGDPFFYGKGVINVESALQ

SEQ ID NO: 69260 - protein, 275 aa, Bacillus sp. LG1
AQTVPWGIPHIKADKAHAAGVTGSGVKVAILDTGIDANHADLNVKGGASFVSGEPNALQDGNGHGTHVAGTVAAINNTTGVLGVAYNADLYAVKVLSASGSGTLSGIAQGIEWSISNGMNVINMSLGGSSGSTALQQACNNAYNRGIVVIAAAGNSGSSGNRNTMGYPARYSSVIAVGAVSSNNTRASFSSVGSELEVMAPGVNILSTTPGNNYASFNGTSMAAPHVAGAAALIKAKYPSMTNVQIRERLKNTATNLGDPFFYGKGVINVESALQ

SEQ ID NO: 69261 - protein, 275 aa, Bacillus sp. LG1
AQTVPWGIPHIKADKAHAAGVTGSGVKVAILDTGIDANHADLNVKGGASFVSGEPNALQDGNDHGTHVAGTVAALNNTTGVLGVAYNADLYAVKVLSASGSGTLSGIAQGIEWSISNGMNVINMSLGGSSGSTALQQACNNAYNRGIVVIAAAGNSGSSGNRNTMGYPARYSSVIAVGAVSSNNTRASFSSVGSELEVMAPGVNILSTTPGNNYASFNGTSMAAPHVAGAAALIKAKYPSMTNVQIRERLKNTATNLGDPFFYGKGVINVESALQ

SEQ ID NO: 69262 - protein, 275 aa, Bacillus sp. LG1
AQTVPWGIPHIKADKAHAAGVTGSGVKVAILDTGIDANHADLNVKGGASFVSGEPNALQDGNGHGTHVAGTVAAENNTTGVLGVAYNADLYAVKVLSASGSGTLSGIAQGIEWSISNGMNVINMSLGGSSGSTALQQACNNAYNRGIVVIAAAGNSGSSGNRNTMGYPARYSSVIAVGAVSSNNTRASFSSVGSELEVMAPGVNILSTTPGNNYASFNGTSMAAPHVAGAAALIKAKYPSMTNVQIRERLKNTATNLGDPFFYGKGVINVESALQ

SEQ ID NO: 69263 - protein, 275 aa, Bacillus sp. LG1
AQTVPWGIPHIKADKAHAAGVTGSGVKVAILDTGIDANHADLNVKGGASFVSGEPNALQDGNGHGTHVAGTVAALNNTTGVLGVAYNADLYAVKVLSASGSGTLSGIAQGIEWSISNGMNVINMSLGGSSGSTALQQACNNAYNRGIVVIAAAGNSGSSGNRNTMGYPARYSSVIAVGAVSSNNTRASFSSVGSELEAMAPGVNILSTTPGNNYASFNGTSMAAPHVAGAAALIKAKYPSMTNVQIRERLKNTATNLGDPFFYGKGVINVESALQ

SEQ ID NO: 69264 - protein, 275 aa, Bacillus sp. LG1
AQTVPWGIPHIKADKAHAAGVTGSGVKEAILDTGIDANHADLNVKGGASFVSGEPNALQDGNGHGTHVAGTVAALNNTTGVLGVAYNADLYAVKVLSASGSGTLSGIAQGIEWSISNGMNVINMSLGGSSGSTALQQACNNAYNRGIVVIAAAGNSGSSGNRNTMGYPARYSSVIAVGAVSSNNTRASFSSVGSELEVMAPGVNILSTTPGNNYASFNGTSMAAPHVAGAAALIKAKYPSMTNVQIRERLKNTATNLGDPFFYGKGVINVESALQ

SEQ ID NO: 69265 - protein, 275 aa, Bacillus sp. LG1
AQTVPWGIPHIKADKAHFAGVTGSGVKVAILDTGIDANHADLNVKGGASFVSGEPNALQDGNGHGTHVAGTVAALNNTTGVLGVAYNADLYAVKVLSASGSGTLSGIAQGIEWSISNGMNVINMSLGGSSGSTALQQACNNAYNRGIVVIAAAGNSGSSGNRNTMGYPARYSSVIAVGAVSSNNTRASFSSVGSELEVMAPGVNILSTTPGNNYASFNGTSMAAPHVAGAAALIKAKYPSMTNVQIRERLKNTATNLGDPFFYGKGVINVESALQ

SEQ ID NO: 69266 - protein, 275 aa, Bacillus sp. LG1
AQTVPWGIPHIKADKAHAAGVTGSGVKVAILDTGIDANHADLNVKGGASFVSGEPNALQDGNGHGTHVAGTVAALNNTTGVLGVAYNADLYAVKVLSASGSGTLSGIAQGIEWSISNGMNVINMSLGGSSGSTALQQACNNAYNRGIVVIAAAGNSGSSGNRNTMGYPARYSSVIAVGAVSSNNTRASFSSVGSELEVMAPGVNILSTTPGNNYASFNGTSMAAPHVAGAAALIKAKYPSMTNVQIRERLKNKATNLGDPFFYGKGVINVESALQ

SEQ ID NO: 69267 - protein, 275 aa, Bacillus sp. LG1
AQTVPWGIPHIKADKAHAAGVTGSGVKVAILDTGIDANHADLNVKGGASFVSGEPNALQDGNGHGTHVAGTVAALNNTTGVLGVAYNADLYAVKVLSASGSGTLSGIAQGIEWSISNGMNVINMSLGGSSGSTALQQACNNADNRGIVVIAAAGNSGSSGNRNTMGYPARYSSVIAVGAVSSNNTRASFSSVGSELEVMAPGVNILSTTPGNNYASFNGTSMAAPHVAGAAALIKAKYPSMTNVQIRERLKNTATNLGDPFFYGKGVINVESALQ

SEQ ID NO: 69268 - protein, 275 aa, Bacillus sp. LG1
AQTVPWGIPHIKADKAHAAGVTGSGVKVAILDTGIDANHADLNVKGGASFVSGEPNALQDGNGHGTHVAGTVAALNNTTGVLGVAYNADLYAVKVLSASGSGTLSGIAQGIEWSISNGMNVINMSLGGSSGSTALQQACNNAYNRGIVVIAAAGNSGSSGNRNTMGYPARYSSVIAVGAVSSNNTRASFSSVGSELEVMAPGVNILSTTPGNNFASFNGTSMAAPHVAGAAALIKAKYPSMTNVQIRERLKNTATNLGDPFFYGKGVINVESALQ

SEQ ID NO: 69269 - protein, 275 aa, Synthetic construct
AQVVPWGIPHIKADKAHASGVTGSGVKVAVLDTGIDANHADLNVKGGASFVSGEPNALQDGNGHGTHVAGTVAALDNTTGVLGVAYNAFLYAVKVLGASGSGTLSGIAQGIEWSIANDMDVINMSLGIPTGSTALQQACNNAYASGIVVVAAAGNSGSNGKRNTMGYPARYSSVIAVGAVDSSNNRASFSSVGSELEVMAPGVSILSTTPGNNYESFNGTSMASPHVAGAAALIKAKYPSMTNVQIRNKLKNTATNLGDAFYYGHGVINVEKALQ

SEQ ID NO: 69270 - protein, 275 aa, Bacillus sp. LG1
AQTVPWGIPHIKADKAHAAGVTGSGVKVAILDTGIDANHADLNVKGGASFVSGEPNALQDGNGHGTHVAGTAAALNNTTGVLGVAYNADLYAVKVLSASGSGTLSGIAQGIEWSISNGMNVINMSLGGSSGSTALQQACNNAYNRGIVVIAAAGNSGSSGNRNTMGYPARYSSVIAVGAVSSNNTRASFSSVGSELEVMAPGVNILSTTPGNNYASFNGTSMAAPHVAGAAALIKAKYPSMTNVQIRERLKNTATNLGDPFFYGKGVINVESALQ

SEQ ID NO: 69271 - protein, 275 aa, Bacillus sp. LG1
AQTVPWGIPHIKSDKAHAAGVTGSGVKVAILDTGIDANHADLNVKGGASFVSGEPNALQDGNGHGTHVAGTVAALNNTTGVLGVAYNADLYAVKVLSASGSGTLSGIAQGIEWSISNGMNVINMSLGGSSGSTALQQACNNAYNRGIVVIAAAGNSGSSGNRNTMGYPARYSSVIAVGAVSSNNTRASFSSVGSELEVMAPGVNILSTTPGNNYASFNGTSMAAPHVAGAAALIKAKYPSMTNVQIRERLKNTATNLGDPFFYGKGVINVESALQ

SEQ ID NO: 69272 - protein, 275 aa, Bacillus sp. LG1
AQTVPWGIPHIKADKAHAAGVTGSGVKVAILDTGIDANHADLNVKGGASFVSGEPNALQDGNGHGTHVAGTVAALNNTTGVLGVAYNADLIAVKVLSASGSGTLSGIAQGIEWSISNGMNVINMSLGGSSGSTALQQACNNAYNRGIVVIAAAGNSGSSGNRNTMGYPARYSSVIAVGAVSSNNTRASFSSVGSELEVMAPGVNILSTTPGNNYASFNGTSMAAPHVAGAAALIKAKYPSMTNVQIRERLKNTATNLGDPFFYGKGVINVESALQ

SEQ ID NO: 69273 - protein, 275 aa, Bacillus sp. LG1
AQTVPWGIPHIKADKAHAAGVTGSGVKVAILDTGIDANHADLNVKGGASFVSGEPNALQDGNGHGTHVAGTVAALNNTTGVLGVAYNADLYAVKVLSASGSGTLSGIAQGIEWSISNGMNVINMSLGGSSGSTALQQACNNAYNRGIVVIAAAGNSGSSGNRNTMGYPARYSSVTAVGAVSSNNTRASFSSVGSELEVMAPGVNILSTTPGNNYASFNGTSMAAPHVAGAAALIKAKYPSMTNVQIRERLKNTATNLGDPFFYGKGVINVESALQ

SEQ ID NO: 69274 - protein, 275 aa, Bacillus sp. LG1
AQTVPWGIPHIKADKAHAAGVTGSGVKVAILDTGIDANHADLNVKGGASFVSGEPNALQDGNGHGTHVAGTVAALNNTTGVLGVAYNADLYAVKVLSASGSGTLSGIAQGIEWSISNGMNVINMSLGGSSGSTALQQACNNAYNRGIVVIAAAGNSGSSGNRNTMGYPARYSSVIAVGAVSSNNTRASFSSVGSELEVMAPGVNILSTTDGNNYASFNGTSMAAPHVAGAAALIKAKYPSMTNVQIRERLKNTATNLGDPFFYGKGVINVESALQ

SEQ ID NO: 69275 - protein, 275 aa, Bacillus sp. LG1
AQTVPWGIPHIKADKAHAAGVTGSGVKVAILDTGIDANHADLNVKGGASFVSGEPNALQDGNGHGTHVAGTVAALNNTTGVLGVAYNADLYAVKVLSASGSGTLSGIAQGIEWSISNGMNVINMSLGGSSGSTALQQACNNAYNWGIVVIAAAGNSGSSGNRNTMGYPARYSSVIAVGAVSSNNTRASFSSVGSELEVMAPGVNILSTTPGNNYASFNGTSMAAPHVAGAAALIKAKYPSMTNVQIRERLKNTATNLGDPFFYGKGVINVESALQ

SEQ ID NO: 69276 - protein, 275 aa, Bacillus sp. LG1
AQTVPWGITHIKADKAHAAGVTGSGVKVAILDTGIDANHADLNVKGGASFVSGEPNALQDGNGHGTHVAGTVAALNNTTGVLGVAYNADLYAVKVLSASGSGTLSGIAQGIEWSISNGMNVINMSLGGSSGSTALQQACNNAYNRGIVVIAAAGNSGSSGNRNTMGYPARYSSVIAVGAVSSNNTRASFSSVGSELEVMAPGVNILSTTPGNNYASFNGTSMAAPHVAGAAALIKAKYPSMTNVQIRERLKNTATNLGDPFFYGKGVINVESALQ

SEQ ID NO: 69277 - protein, 275 aa, Bacillus sp. LG1
AQTVPWGIPHIKADKAHAAGVTGSGVKVAILDTGIDANHADLNVKGGASFVSGEPNALQDGNGHGTHVAGTVAALNNTTGVLGVAYNADLYAVKVLSASGSGTLSGIAQGIEWSISNGMNVINMSLGGSSGSTALQQACNNAYNRGIVVIAAAGNSGSSGNRNTMGYPARYSSVIAVGAVSSNNTRASFSSVGSELEVMAPGVNILSTTPGNNYASFNGTSMAAPHVAGAAALIKAVYPSMTNVQIRERLKNTATNLGDPFFYGKGVINVESALQ

SEQ ID NO: 69278 - protein, 275 aa, Bacillus sp. LG1
AQTVPWGIPHIKADKAHAAGVTGSGVKVAILDTGIDANHADLNVKGGASFVSGEPNALQDGNGHGTHVAGTVAALNNTTGVLGVAYNADLYAVKVLSASGSGTLSGIAQGIEWSISNGMNVINMSLGGSSGSTALQQACNNAYNRGIVVIAAAGNSGSSGNRNTMGYPARYSSVIAVGAVSSNNTRASFSSVGSELEVMAPGVNILSTTPGNNYASFNGTSMAAPHVAGAAALFKAKYPSMTNVQIRERLKNTATNLGDPFFYGKGVINVESALQ

SEQ ID NO: 69279 - protein, 275 aa, Bacillus sp. LG1
AQTVPWGIPHIKADKAHAAGVTGSGVKVAILDTGIDANHADLNVKGGASFVSGEPNALQDGNGHGTHVAGTVAALNNHTGVLGVAYNADLYAVKVLSASGSGTLSGIAQGIEWSISNGMNVINMSLGGSSGSTALQQACNNAYNRGIVVIAAAGNSGSSGNRNTMGYPARYSSVIAVGAVSSNNTRASFSSVGSELEVMAPGVNILSTTPGNNYASFNGTSMAAPHVAGAAALIKAKYPSMTNVQIRERLKNTATNLGDPFFYGKGVINVESALQ

SEQ ID NO: 69280 - protein, 275 aa, Bacillus sp. LG1
AQTVPWGIPHIKADKAHAAGVTGSGVKVAILDTGIDANHADLNVKGGASFVSGEPNALQDGNGHGTHVAGTVAALNNTTGVLGVAYNADLYAVKVLSASGSGTLSGIAQGIEWSISNGMNVINMSLGGSSGSTALQQACNNAYNRGIVVIAAAGNSGSSGNRNTMGYPARYSSVIAVGAVSSNNTRASFSSVGSELEVMAPGVNILSTTPGNNIASFNGTSMAAPHVAGAAALIKAKYPSMTNVQIRERLKNTATNLGDPFFYGKGVINVESALQ

SEQ ID NO: 69281 - protein, 275 aa, Bacillus sp. LG1
AQTVPWGIPHIKADKAHAAGVTGSGVKVAILDTGIDANHADLNVKGGASFVSGEPNALQDGNGHGTHVAGTVAALNNTTGVLGVAYNADLYAVKVLSASGSGTLSGIAQGIEWSISNGMNVINMSLGGSSGSTALQQACNNAYNRGIVVIAAAGNSGSSGNRNTMGYPARYSSVIAVGAVSSNNTRASFSSVGSELEVMAPGVNILSTTPGNNYASFNGTSMAAPHVAGAAALIKAKYASMTNVQIRERLKNTATNLGDPFFYGKGVINVESALQ

SEQ ID NO: 69282 - protein, 275 aa, Bacillus sp. LG1
AQTVPWGIPHIKADKAHAAGVTGSGVKVAILDTGIDANHADLNVKGGASFVSGEPNALQDGNGHGTHVAGTVAALNNTTGVLGVAYNADLYAVKVLSASGSGTLSGIAQGIEWSISNGMNVINMSLGGSSGSTALQQACNNAYNRGIVVIAAAGNSGSSGNRNTMGYPARYSSVIAVGAVSSNNTRASFSSVGSELEVMAPGVNILSTTPGNNYASFNGTSMAAPHVAGAAALIKAKYNSMTNVQIRERLKNTATNLGDPFFYGKGVINVESALQ

SEQ ID NO: 69283 - protein, 275 aa, Bacillus sp. LG1
AQTVPWGIPHIKADKAHAAGVTGSGVKVAILDTGIDANHADLNVKGGASFVSGEPNALQDGNGHGTHVAGTVAALNNTTGVLGVAYNADLYAVKVLSASGSGTLSGIAQGIEWSISNGMNVINMSLGGSSGSTALQQACNNAYNRGIVVIAAAGNSGSSGNRNTMGYPARYSSVIAVGAVSSNNTRASFSSVGSELEVMAPGVNILSTTPGNNYASFNGTSMAAPHVAGAAALIKAKYPSMTNVQIRERLKNTAKNLGDPFFYGKGVINVESALQ

SEQ ID NO: 69284 - protein, 275 aa, Bacillus sp. LG1
AQTVPWGIPHIKADKAHAAGVTGSGVKVAILDTGIDANHADLNVKGGASFVSGEPNALQDGNGHGTHVAGTVAALNNTTGVLGVAYNADLYAVKVLSASGSGTLSGIAQGIEWSISNGLNVINMSLGGSSGSTALQQACNNAYNRGIVVIAAAGNSGSSGNRNTMGYPARYSSVIAVGAVSSNNTRASFSSVGSELEVMAPGVNILSTTPGNNYASFNGTSMAAPHVAGAAALIKAKYPSMTNVQIRERLKNTATNLGDPFFYGKGVINVESALQ

SEQ ID NO: 69285 - protein, 275 aa, Bacillus sp. LG1
AQTVPWGIPHIKADKAHAAGVTGSGVKVAILDTGIDANHADLNVKGGASFVSGEPNALQDGNGHGTHVAGTVAALNNTTGVLGVAYNADLYAVKVLSASGSGTLSGIAQGIEWSISNGMNVINMSLGGSSGSTALQQACNNAYNRGIVVIAAAGNSGSSGNRNTMGYPARYSSVIAVGAVSSNNTRASFSSVGSELEVMAPGVNILSTTPGNNYASFNGTSMAAPHVAGAAALAKAKYPSMTNVQIRERLKNTATNLGDPFFYGKGVINVESALQ

SEQ ID NO: 69286 - protein, 275 aa, Bacillus sp. LG1
AQTVPWGIPHIKADKAHAAGVTGSGVKVAILDTGIDANHADLNVKGGASFVSGEPNALQDGNGHGTHVAGTVAALNNTTGVLGVAYNADLYAVKVLSASGSGTLSGIAQGIEWSISNGMNVINMSLGGSSGSTALQQACNNAYNRGIVTIAAAGNSGSSGNRNTMGYPARYSSVIAVGAVSSNNTRASFSSVGSELEVMAPGVNILSTTPGNNYASFNGTSMAAPHVAGAAALIKAKYPSMTNVQIRERLKNTATNLGDPFFYGKGVINVESALQ

SEQ ID NO: 69287 - protein, 275 aa, Bacillus sp. LG1
AQTVPWGIPHIKADKAHAAGVTGSGVKVAILDTGIDANHADLNVKGGASFVSGEPNALQDGNGHGTHVAGTVAALNNTTGVLGVAYNADLYAVKVLSASGSGTLSGIAQGIEWSISNGMNVINMSLGGSSGSTALQQACNNAYNRGIVVIAAAGNSGSSGNRNTMGYPARYSSVIAVGAVSSENTRASFSSVGSELEVMAPGVNILSTTPGNNYASFNGTSMAAPHVAGAAALIKAKYPSMTNVQIRERLKNTATNLGDPFFYGKGVINVESALQ

SEQ ID NO: 69288 - protein, 275 aa, Bacillus sp. LG1
AQTVPWGIPHIKADKAHAAGVTGSGVKVAILDTGIDANHADLNVKGGASFVSGEPNALQDGNGHGTHVAGTVAALNNTTGVLGVAYNADLYAVKVLSASGSGTLSGIAQGIEWSISNGMNVINMSLGGSSGSTALQQACNNAYNRGIVVIAAAGNSGSSGNRNTMGYPARYSSVIAVGAVSSNNTRASMSSVGSELEVMAPGVNILSTTPGNNYASFNGTSMAAPHVAGAAALIKAKYPSMTNVQIRERLKNTATNLGDPFFYGKGVINVESALQ

SEQ ID NO: 69289 - protein, 275 aa, Bacillus sp. LG1
AQTVPWGIPHIKADKAHAAGVTGSGVKVAILDTGIDANHADLNVKGGASFVSGEPNALQDGNGHGTKVAGTVAALNNTTGVLGVAYNADLYAVKVLSASGSGTLSGIAQGIEWSISNGMNVINMSLGGSSGSTALQQACNNAYNRGIVVIAAAGNSGSSGNRNTMGYPARYSSVIAVGAVSSNNTRASFSSVGSELEVMAPGVNILSTTPGNNYASFNGTSMAAPHVAGAAALIKAKYPSMTNVQIRERLKNTATNLGDPFFYGKGVINVESALQ

SEQ ID NO: 69290 - protein, 275 aa, Bacillus sp. LG1
AQTVPWGIPHIKADKAHAAGVTGSGVKVAILDTGIDANHADLNVKGGASFVSGEPNALQDGNGHGTHVAGTVAALNNTTGVLGVAYNADLYAVKVLSASGSGTLSGIAQGIEWSISNGMNVINMSLGGSSGSTALQQACNNAYNRGIVVIAAAGNSGSSGNRNTMGYPARYSSVIAVGAVSSNNTRASFSSVGSELEVMAPGVNILSTTPGNNYASFNGTSMAAPHVAGAASLIKAKYPSMTNVQIRERLKNTATNLGDPFFYGKGVINVESALQ

SEQ ID NO: 69291 - protein, 275 aa, Bacillus sp. LG1
AQTVPWGIPHIKADKAHAAGVTGSGVKVAILDTGIDANHADLNVKGGASFVSGEPNALQDGNGHGTHVAGTVAALNNTKGVLGVAYNADLYAVKVLSASGSGTLSGIAQGIEWSISNGMNVINMSLGGSSGSTALQQACNNAYNRGIVVIAAAGNSGSSGNRNTMGYPARYSSVIAVGAVSSNNTRASFSSVGSELEVMAPGVNILSTTPGNNYASFNGTSMAAPHVAGAAALIKAKYPSMTNVQIRERLKNTATNLGDPFFYGKGVINVESALQ

SEQ ID NO: 69292 - protein, 275 aa, Bacillus sp. LG1
AQTVPWGIPHIKADKAHAAGVTGSGVKVAILDTGIDANHADLNVKGGASFVSGEPNALQDGNGHGTHVAGTVAALNNTTGVLGVAYNADLYAVKVLSASGSGTLSGIAQGIEWSISNGMNVINMSLGGSSGSTALQQACNNAYNRGIVVIAAAGNSGMSGNRNTMGYPARYSSVIAVGAVSSNNTRASFSSVGSELEVMAPGVNILSTTPGNNYASFNGTSMAAPHVAGAAALIKAKYPSMTNVQIRERLKNTATNLGDPFFYGKGVINVESALQ

SEQ ID NO: 69293 - protein, 275 aa, Bacillus sp. LG1
AQTVPWGIPHIKADKAHAAGVTGSGVKVAILDTGIDANHADLNVKGGASFVSGEPNALQDGNGHGTHVAGTVAALNNTTGVLGVAYNADLYAVKVLSASGSGTLSGIAQGIEWSISNGMNVINMSLGGSSGSTALQTACNNAYNRGIVVIAAAGNSGSSGNRNTMGYPARYSSVIAVGAVSSNNTRASFSSVGSELEVMAPGVNILSTTPGNNYASFNGTSMAAPHVAGAAALIKAKYPSMTNVQIRERLKNTATNLGDPFFYGKGVINVESALQ

SEQ ID NO: 69294 - protein, 275 aa, Bacillus sp. LG1
AQTVPWGIPHIKADKAHAAGVTGSGVKVAILDTGIDANHADLNVKGGASFVSGEPNALQNGNGHGTHVAGTVAALNNTTGVLGVAYNADLYAVKVLSASGSGTLSGIAQGIEWSISNGMNVINMSLGGSSGSTALQQACNNAYNRGIVVIAAAGNSGSSGNRNTMGYPARYSSVIAVGAVSSNNTRASFSSVGSELEVMAPGVNILSTTPGNNYASFNGTSMAAPHVAGAAALIKAKYPSMTNVQIRERLKNTATNLGDPFFYGKGVINVESALQ

SEQ ID NO: 69295 - protein, 275 aa, Bacillus sp. LG1
AQTVPWGIPHMKADKAHAAGVTGSGVKVAILDTGIDANHADLNVKGGASFVSGEPNALQDGNGHGTHVAGTVAALNNTTGVLGVAYNADLYAVKVLSASGSGTLSGIAQGIEWSISNGMNVINMSLGGSSGSTALQQACNNAYNRGIVVIAAAGNSGSSGNRNTMGYPARYSSVIAVGAVSSNNTRASFSSVGSELEVMAPGVNILSTTPGNNYASFNGTSMAAPHVAGAAALIKAKYPSMTNVQIRERLKNTATNLGDPFFYGKGVINVESALQ

SEQ ID NO: 69296 - protein, 275 aa, Bacillus sp. LG1
AQTVPWGIPHIKADKAHAAGVTGSGVKVAILDTGIDANHADLNVKGGASFVSGEPNALQDGNGHGTHIAGTVAALNNTTGVLGVAYNADLYAVKVLSASGSGTLSGIAQGIEWSISNGMNVINMSLGGSSGSTALQQACNNAYNRGIVVIAAAGNSGSSGNRNTMGYPARYSSVIAVGAVSSNNTRASFSSVGSELEVMAPGVNILSTTPGNNYASFNGTSMAAPHVAGAAALIKAKYPSMTNVQIRERLKNTATNLGDPFFYGKGVINVESALQ

SEQ ID NO: 69297 - protein, 275 aa, Bacillus sp. LG1
AQTVPWGIPHIKADKAHAAGVTGSGVKVAILDTGIDANHADLNVKGGASFVSGEPNALQDGNGHGTHVAGTLAALNNTTGVLGVAYNADLYAVKVLSASGSGTLSGIAQGIEWSISNGMNVINMSLGGSSGSTALQQACNNAYNRGIVVIAAAGNSGSSGNRNTMGYPARYSSVIAVGAVSSNNTRASFSSVGSELEVMAPGVNILSTTPGNNYASFNGTSMAAPHVAGAAALIKAKYPSMTNVQIRERLKNTATNLGDPFFYGKGVINVESALQ

SEQ ID NO: 69298 - protein, 275 aa, Bacillus sp. LG1
AQTVPWGIPHIKADKAHAAGVTGSGVKVAILDTGIDANHADLNVKGGASFVSGEPNALQDGNGHGTHVAGTVAALNNTTGVLGVAYNADLYAVKVLSASGSGTLSGIAQGIEWSISNGMNVINMSLGGSSGSTALQQACNNAYNRGIVVIAAAGNSGSSGNRNTMGYPARYSSVIAVGAVSSNNTRASFSSVGSELEVMAPGVNILSTTPGNNYASFNGTSMAAPHVAGAAALIKAKYPSMTNVYIRERLKNTATNLGDPFFYGKGVINVESALQ

SEQ ID NO: 69299 - protein, 275 aa, Bacillus sp. LG1
AQTVPWGIPHIKADKAHAAGVTGSGVKVAILDTGIDANHADLNVKGGASFVSGEPNALQDGNGHGTHVAGTVAALNNTTGVLGVAYNADLYAVKVLSASGSGTLSGIAQGIEWSISNGMNVINMSLGGSSGSTALQQACNNAYNRGIVAIAAAGNSGSSGNRNTMGYPARYSSVIAVGAVSSNNTRASFSSVGSELEVMAPGVNILSTTPGNNYASFNGTSMAAPHVAGAAALIKAKYPSMTNVQIRERLKNTATNLGDPFFYGKGVINVESALQ

SEQ ID NO: 69300 - protein, 275 aa, Bacillus sp. LG1
AQTVPWGHPHIKADKAHAAGVTGSGVKVAILDTGIDANHADLNVKGGASFVSGEPNALQDGNGHGTHVAGTVAALNNTTGVLGVAYNADLYAVKVLSASGSGTLSGIAQGIEWSISNGMNVINMSLGGSSGSTALQQACNNAYNRGIVVIAAAGNSGSSGNRNTMGYPARYSSVIAVGAVSSNNTRASFSSVGSELEVMAPGVNILSTTPGNNYASFNGTSMAAPHVAGAAALIKAKYPSMTNVQIRERLKNTATNLGDPFFYGKGVINVESALQ

SEQ ID NO: 69301 - protein, 275 aa, Bacillus sp. LG1
AQTVPWGIPHIKADKAHAAGVTGSGVKVAILDTGIDANHADLNVKGGASFVSGEPNALQDGNGHGTHVAGTVAALNNTTGVLGVAYNADLYAVKVLSASGSGTLSGIAQGIEWSISNGMNVINMSLGGSSGSTALQQACNNAYNRGIVVIAAAGNSGSSGNRNTMGYPARYSSVIAVGAVSSNNTRASFSSVGSELEVMAPGVNILSTTPGNNYASFNGTSMAAPHVAGAAALIKAKYPSMTNVQIRERLKNTATNLGDPFFYGKGVINIESALQ

SEQ ID NO: 69302 - protein, 275 aa, Bacillus sp. LG1
AQTVPWGIPHIKADKAHAAGVTGSGVKVAILDTGIDANHADLNVKGGASFVSGEPNALQDGNGHGTHVAGTVAALNNTTGVLGVAYNADLYAVKVLSASGSGTLSGIAQGIEWSISNGMNVINMSLGGSSGSTALQIACNNAYNRGIVVIAAAGNSGSSGNRNTMGYPARYSSVIAVGAVSSNNTRASFSSVGSELEVMAPGVNILSTTPGNNYASFNGTSMAAPHVAGAAALIKAKYPSMTNVQIRERLKNTATNLGDPFFYGKGVINVESALQ

SEQ ID NO: 69303 - protein, 275 aa, Bacillus sp. LG1
AQTVPWGIPHIKADKAHAAGVTGSGVKVAILDTGIDANHADLNVKGGASFVSGEPNALQDGNGHGTHVAGTVAALNNTTGVLGVAYNADLYAVKVLSASGSGTLSGIAQGIEWSISNGMNVINMSLGGSSGSDALQQACNNAYNRGIVVIAAAGNSGSSGNRNTMGYPARYSSVIAVGAVSSNNTRASFSSVGSELEVMAPGVNILSTTPGNNYASFNGTSMAAPHVAGAAALIKAKYPSMTNVQIRERLKNTATNLGDPFFYGKGVINVESALQ

SEQ ID NO: 69304 - protein, 275 aa, Bacillus sp. LG1
AQTVPWGIPHIKADKAHAAGVTGSGVKVAILDTGIDANHADLNVKGGASFVSREPNALQDGNGHGTHVAGTVAALNNTTGVLGVAYNADLYAVKVLSASGSGTLSGIAQGIEWSISNGMNVINMSLGGSSGSTALQQACNNAYNRGIVVIAAAGNSGSSGNRNTMGYPARYSSVIAVGAVSSNNTRASFSSVGSELEVMAPGVNILSTTPGNNYASFNGTSMAAPHVAGAAALIKAKYPSMTNVQIRERLKNTATNLGDPFFYGKGVINVESALQ

SEQ ID NO: 69305 - protein, 275 aa, Bacillus sp. LG1
AQTVPWGIPHIKADKAHAAGVTGSGVKVAILDTGIDANHADLNVKGGASFVSGEPNALQDGNSHGTHVAGTVAALNNTTGVLGVAYNADLYAVKVLSASGSGTLSGIAQGIEWSISNGMNVINMSLGGSSGSTALQQACNNAYNRGIVVIAAAGNSGSSGNRNTMGYPARYSSVIAVGAVSSNNTRASFSSVGSELEVMAPGVNILSTTPGNNYASFNGTSMAAPHVAGAAALIKAKYPSMTNVQIRERLKNTATNLGDPFFYGKGVINVESALQ

SEQ ID NO: 69306 - protein, 275 aa, Bacillus sp. LG1
AQTVPWGIPHIKADKAHAAGVTGSGVKVAILDTGIDANHADLVVKGGASFVSGEPNALQDGNGHGTHVAGTVAALNNTTGVLGVAYNADLYAVKVLSASGSGTLSGIAQGIEWSISNGMNVINMSLGGSSGSTALQQACNNAYNRGIVVIAAAGNSGSSGNRNTMGYPARYSSVIAVGAVSSNNTRASFSSVGSELEVMAPGVNILSTTPGNNYASFNGTSMAAPHVAGAAALIKAKYPSMTNVQIRERLKNTATNLGDPFFYGKGVINVESALQ

SEQ ID NO: 69307 - protein, 275 aa, Bacillus sp. LG1
AQTVPWGIPHIKADKAHAAGVTGSGHKVAILDTGIDANHADLNVKGGASFVSGEPNALQDGNGHGTHVAGTVAALNNTTGVLGVAYNADLYAVKVLSASGSGTLSGIAQGIEWSISNGMNVINMSLGGSSGSTALQQACNNAYNRGIVVIAAAGNSGSSGNRNTMGYPARYSSVIAVGAVSSNNTRASFSSVGSELEVMAPGVNILSTTPGNNYASFNGTSMAAPHVAGAAALIKAKYPSMTNVQIRERLKNTATNLGDPFFYGKGVINVESALQ

SEQ ID NO: 69308 - protein, 275 aa, Bacillus sp. LG1
AQTVPWGIPHIKADKAHAAGVTGSGVKVAILDTGIDANHADLNVKGGASFVSGEPNALQDGNGHGTHVAGTVAALNNTTGVLGVAYNADLYAVKVLSASGSGTLSGIAQGIEWSISNGMNVINMSLGGSSGSTALQQACNNAYNRGIVVIAAAGNSGSSGNRNTMGYPARYSSVIAVGAVSSNNTRASFSSVGSELEVMAPGVNILSTTPGNNYASFNGTSMAAPQVAGAAALIKAKYPSMTNVQIRERLKNTATNLGDPFFYGKGVINVESALQ

SEQ ID NO: 69309 - protein, 275 aa, Synthetic construct
AQVVPWGIPHIKADKAHASGVTGSGVKVAVLDTGIDANHEDLNVKGGASFVSGEPNALQDGNGHGTHVAGTVAALDNTTGVLGVAYNAFLYAVKVLGASGSGTLSGIAQGIEWSIANDMDVINMSLGISTGSTALQQACNNAYASGIVVVAAAGNSGSNGKRNTMGYPARYSSVIAVGAVDSSNNRASFSSVGSELEVMAPGVSILSTTPGNNYESFNGTSMASPHVAGAAALIKAKYPSMTNVQIRNKLKNTATNLGDAFYYGHGVINVEKALQ

SEQ ID NO: 69310 - protein, 275 aa, Bacillus sp. LG1
AQTVPWGIPHIKADKAHAAGVTGSGVKVAILDTGIDANHADLNVKGGASFVSGEPNALQDGNGHGTHVAGTVAALNNTTGVLGVAYNADLYAVKVLSASGSGTLSGIAQGIEWSISNGMNVIEMSLGGSSGSTALQQACNNAYNRGIVVIAAAGNSGSSGNRNTMGYPARYSSVIAVGAVSSNNTRASFSSVGSELEVMAPGVNILSTTPGNNYASFNGTSMAAPHVAGAAALIKAKYPSMTNVQIRERLKNTATNLGDPFFYGKGVINVESALQ

SEQ ID NO: 69311 - protein, 275 aa, Bacillus sp. LG1
AQTVPWGIPHIKADKAHAAGVTGSGVKVAILDTGIDANHADLNVKGGASFVSGEPNALQDGNGHGTHVAGTVAALNNTTGVLGVAYNADLYAVKVLSASGSGTLSGIAQGIEWSISNGMNVINMSLGGSSGSTALQQACNNAYNRGIVVIAAAGNSGSSGNRNTMGYPARYSSVIAVGAVSSNNTRASFSSVGSELEVMAPGVNILSTTPGNNYASFNGTSMAAPHVAGAAALIKAKYPSMTNVQIRERLKNTATNLGDPFFYGKGVINVWSALQ

SEQ ID NO: 69312 - protein, 275 aa, Bacillus sp. LG1
AQTVPWGIPHIKADKAHAAGVTGSGVKVAILDTGIDANHADLNVKGGASFESGEPNALQDGNGHGTHVAGTVAALNNTTGVLGVAYNADLYAVKVLSASGSGTLSGIAQGIEWSISNGMNVINMSLGGSSGSTALQQACNNAYNRGIVVIAAAGNSGSSGNRNTMGYPARYSSVIAVGAVSSNNTRASFSSVGSELEVMAPGVNILSTTPGNNYASFNGTSMAAPHVAGAAALIKAKYPSMTNVQIRERLKNTATNLGDPFFYGKGVINVESALQ

SEQ ID NO: 69313 - protein, 275 aa, Bacillus sp. LG1
AQTVPWGIPHIKADKAHAAGVTGSGVKVAILDTGIDANHADLNVKGGASFVSGEPNALQDGNGHGTHVAGTVAALNNTTGVLGVAYNADLYAVKVLSASGSGTLSGIAQGIEWSISNGMNVINMSLGGSSGSTALQQACNNAYNRGIFVIAAAGNSGSSGNRNTMGYPARYSSVIAVGAVSSNNTRASFSSVGSELEVMAPGVNILSTTPGNNYASFNGTSMAAPHVAGAAALIKAKYPSMTNVQIRERLKNTATNLGDPFFYGKGVINVESALQ

SEQ ID NO: 69314 - protein, 275 aa, Bacillus sp. LG1
AQTVPWGIPHIKADKAHRAGVTGSGVKVAILDTGIDANHADLNVKGGASFVSGEPNALQDGNGHGTHVAGTVAALNNTTGVLGVAYNADLYAVKVLSASGSGTLSGIAQGIEWSISNGMNVINMSLGGSSGSTALQQACNNAYNRGIVVIAAAGNSGSSGNRNTMGYPARYSSVIAVGAVSSNNTRASFSSVGSELEVMAPGVNILSTTPGNNYASFNGTSMAAPHVAGAAALIKAKYPSMTNVQIRERLKNTATNLGDPFFYGKGVINVESALQ

SEQ ID NO: 69315 - protein, 275 aa, Bacillus sp. LG1
AQTVPWGIPHIKADKAHAAGVTGSGVKVAILDTGIDANHADLNVKGGASFVSGEPNALQDGNGHGTHVAGTVAALNNTTGVLGVAYNADLYAVKVLSASGSGTLSGIAQGIEWSISNGMNVINMSLGGSSGSTALQQACNNAYNRGIVVIAAAGNSGSSGNRNTMGYPARYSSVIAVGAVSSNNTRASISSVGSELEVMAPGVNILSTTPGNNYASFNGTSMAAPHVAGAAALIKAKYPSMTNVQIRERLKNTATNLGDPFFYGKGVINVESALQ

SEQ ID NO: 69316 - protein, 275 aa, Bacillus sp. LG1
AQTVPWGIMHIKADKAHAAGVTGSGVKVAILDTGIDANHADLNVKGGASFVSGEPNALQDGNGHGTHVAGTVAALNNTTGVLGVAYNADLYAVKVLSASGSGTLSGIAQGIEWSISNGMNVINMSLGGSSGSTALQQACNNAYNRGIVVIAAAGNSGSSGNRNTMGYPARYSSVIAVGAVSSNNTRASFSSVGSELEVMAPGVNILSTTPGNNYASFNGTSMAAPHVAGAAALIKAKYPSMTNVQIRERLKNTATNLGDPFFYGKGVINVESALQ

SEQ ID NO: 69317 - protein, 275 aa, Bacillus sp. LG1
AQTVPWGIPHIKADKAHAAGVTGSGVKVAILDTGIDANGADLNVKGGASFVSGEPNALQDGNGHGTHVAGTVAALNNTTGVLGVAYNADLYAVKVLSASGSGTLSGIAQGIEWSISNGMNVINMSLGGSSGSTALQQACNNAYNRGIVVIAAAGNSGSSGNRNTMGYPARYSSVIAVGAVSSNNTRASFSSVGSELEVMAPGVNILSTTPGNNYASFNGTSMAAPHVAGAAALIKAKYPSMTNVQIRERLKNTATNLGDPFFYGKGVINVESALQ

SEQ ID NO: 69318 - protein, 275 aa, Bacillus sp. LG1
AQTVPWGIPHIKADKAHAAGVTGSGVKVAILDTGIDANHADLNVKGGKSFVSGEPNALQDGNGHGTHVAGTVAALNNTTGVLGVAYNADLYAVKVLSASGSGTLSGIAQGIEWSISNGMNVINMSLGGSSGSTALQQACNNAYNRGIVVIAAAGNSGSSGNRNTMGYPARYSSVIAVGAVSSNNTRASFSSVGSELEVMAPGVNILSTTPGNNYASFNGTSMAAPHVAGAAALIKAKYPSMTNVQIRERLKNTATNLGDPFFYGKGVINVESALQ

SEQ ID NO: 69319 - protein, 275 aa, Bacillus sp. LG1
AQTVPWGIPHIKADKAHAAGVTGSGVKVAILDTGIDANHADLNVKGGASFVSGEPNALQDGNGHGTHVAGTVAALNNTTGVLGVAYNADLYAVKVLSASGSGTLSGIAQGIEWSISNGMNVINMSLGGSSGSTALQQACNNAYNRGIVVIAAAGNSGSSGNRNTMGYPARYSSVIAVGAVSSNNTRASFSSVGSELEVMATGVNILSTTPGNNYASFNGTSMAAPHVAGAAALIKAKYPSMTNVQIRERLKNTATNLGDPFFYGKGVINVESALQ

SEQ ID NO: 69320 - protein, 275 aa, Bacillus sp. LG1
AQTVPWGIPHIKADKAHAAGVTGSGVKVAILDTGIDANHADLNVKGGASFVSGEPNALQDGNGHGTHVAGTVAALNNTTGVLGVAYNADLYAVKVLSASGSGTLSGIAQGIEWSISNGMNVINMSLGGSSGSTALQQACNNAYNRGIVVIAAAGNSGSSGNRNTMGYPARQSSVIAVGAVSSNNTRASFSSVGSELEVMAPGVNILSTTPGNNYASFNGTSMAAPHVAGAAALIKAKYPSMTNVQIRERLKNTATNLGDPFFYGKGVINVESALQ

SEQ ID NO: 69321 - protein, 275 aa, Bacillus sp. LG1
AQTVPWGIPHIKADKAHAAGVTGSGVKVAILDTGIDANHADLNVKGGASFVSGEPNALQDGNGHGTHVAGTVAALNNTTGVLGVAYNADLYAVKVLSASGSGTLSGIAQGIEWSISNGMNVINMSLGGSSGSTALQQACNNAYNRGIVVIAAAGNSGSSGNRNTMGYPARYSSVAAVGAVSSNNTRASFSSVGSELEVMAPGVNILSTTPGNNYASFNGTSMAAPHVAGAAALIKAKYPSMTNVQIRERLKNTATNLGDPFFYGKGVINVESALQ

SEQ ID NO: 69322 - protein, 275 aa, Bacillus sp. LG1
AQTVPWGIPHIKADKAHAAGVTGSGVKVAILDTGIDANHADLNVKGGASFVSGEPNALQDGNGHGTHVAGTVAALNNTTGVLGLAYNADLYAVKVLSASGSGTLSGIAQGIEWSISNGMNVINMSLGGSSGSTALQQACNNAYNRGIVVIAAAGNSGSSGNRNTMGYPARYSSVIAVGAVSSNNTRASFSSVGSELEVMAPGVNILSTTPGNNYASFNGTSMAAPHVAGAAALIKAKYPSMTNVQIRERLKNTATNLGDPFFYGKGVINVESALQ

SEQ ID NO: 69323 - protein, 275 aa, Bacillus sp. LG1
AQTVPWGIPHIKADKAHAAGVTGSGVKVAILDTGIDANHADLNVKGGASFVSGEPNALQDGNGHGTVVAGTVAALNNTTGVLGVAYNADLYAVKVLSASGSGTLSGIAQGIEWSISNGMNVINMSLGGSSGSTALQQACNNAYNRGIVVIAAAGNSGSSGNRNTMGYPARYSSVIAVGAVSSNNTRASFSSVGSELEVMAPGVNILSTTPGNNYASFNGTSMAAPHVAGAAALIKAKYPSMTNVQIRERLKNTATNLGDPFFYGKGVINVESALQ

SEQ ID NO: 69324 - protein, 275 aa, Bacillus sp. LG1
AQTVPWGIPHIKADKAHAAGVTGSGVKVAILDTGIDANHADLNVKGGASFVSGEPNALQDGNGHGTHVAGTVAALNNTTGVLGVAYNADLYAVKVLSASGAGTLSGIAQGIEWSISNGMNVINMSLGGSSGSTALQQACNNAYNRGIVVIAAAGNSGSSGNRNTMGYPARYSSVIAVGAVSSNNTRASFSSVGSELEVMAPGVNILSTTPGNNYASFNGTSMAAPHVAGAAALIKAKYPSMTNVQIRERLKNTATNLGDPFFYGKGVINVESALQ

SEQ ID NO: 69325 - protein, 275 aa, Bacillus sp. LG1
AQTVPWGIPHIKADKAHAAGVTGSGVKVAILDTGIDANHADLNVKGGASFVSGEPNALQDGNGHGTHVAGTVIALNNTTGVLGVAYNADLYAVKVLSASGSGTLSGIAQGIEWSISNGMNVINMSLGGSSGSTALQQACNNAYNRGIVVIAAAGNSGSSGNRNTMGYPARYSSVIAVGAVSSNNTRASFSSVGSELEVMAPGVNILSTTPGNNYASFNGTSMAAPHVAGAAALIKAKYPSMTNVQIRERLKNTATNLGDPFFYGKGVINVESALQ

SEQ ID NO: 69326 - protein, 275 aa, Bacillus sp. LG1
AQTVPWGIPHIKADKAHAAGVTGSGVKVAILDTGIDANHADLNVKGGASFVSGEPNALQDGNGHGTHVAGTVAALNNTTGVLGVAYNADLYAVKVLSASGSGTLSGIAQGIEWSISNGMNVINMSLGGSSGSTALQQACNNAYNRGIVVIAAAGNSGSSGNRNTMGYPARYSSVIAVGAVSSNNTRASFSSVGSELEVMAPGVNILSTTPGNNYASFNGTSMAAPHVAGAAALIKAKYPSMTNVWIRERLKNTATNLGDPFFYGKGVINVESALQ

SEQ ID NO: 69327 - protein, 275 aa, Bacillus sp. LG1
AQTVPWGIPHIKADKAHAAGVTGSGVKVAILDTGIDANHADLNVKGGASFVSGEPNALQDGNGHGTHVAGTVAALNNTTGVLGVAYNADLYAVKVLSASGSGTLSGIAQGIEWSISNGMNVINMSLGGSSPSTALQQACNNAYNRGIVVIAAAGNSGSSGNRNTMGYPARYSSVIAVGAVSSNNTRASFSSVGSELEVMAPGVNILSTTPGNNYASFNGTSMAAPHVAGAAALIKAKYPSMTNVQIRERLKNTATNLGDPFFYGKGVINVESALQ

SEQ ID NO: 69328 - protein, 275 aa, Bacillus sp. LG1
AQTVPWGIPHIKADKAHAAHVTGSGVKVAILDTGIDANHADLNVKGGASFVSGEPNALQDGNGHGTHVAGTVAALNNTTGVLGVAYNADLYAVKVLSASGSGTLSGIAQGIEWSISNGMNVINMSLGGSSGSTALQQACNNAYNRGIVVIAAAGNSGSSGNRNTMGYPARYSSVIAVGAVSSNNTRASFSSVGSELEVMAPGVNILSTTPGNNYASFNGTSMAAPHVAGAAALIKAKYPSMTNVQIRERLKNTATNLGDPFFYGKGVINVESALQ

SEQ ID NO: 69329 - protein, 275 aa, Bacillus sp. LG1
AQTVPWGIPHIKADKAHAAGVTGSGVKVAILDTGIDANHADLNVKGGASFVSGEPNALQDGNGHGTHVAGTVAALNNTTGVLGVAYNADLYAVKVLSASFSGTLSGIAQGIEWSISNGMNVINMSLGGSSGSTALQQACNNAYNRGIVVIAAAGNSGSSGNRNTMGYPARYSSVIAVGAVSSNNTRASFSSVGSELEVMAPGVNILSTTPGNNYASFNGTSMAAPHVAGAAALIKAKYPSMTNVQIRERLKNTATNLGDPFFYGKGVINVESALQ

SEQ ID NO: 69330 - protein, 275 aa, Bacillus sp. LG1
AQTVPWGIPHIKADKAHAAGVTGSGVKVAILDTGIDANHADLNAKGGASFVSGEPNALQDGNGHGTHVAGTVAALNNTTGVLGVAYNADLYAVKVLSASGSGTLSGIAQGIEWSISNGMNVINMSLGGSSGSTALQQACNNAYNRGIVVIAAAGNSGSSGNRNTMGYPARYSSVIAVGAVSSNNTRASFSSVGSELEVMAPGVNILSTTPGNNYASFNGTSMAAPHVAGAAALIKAKYPSMTNVQIRERLKNTATNLGDPFFYGKGVINVESALQ

SEQ ID NO: 69331 - protein, 275 aa, Bacillus sp. LG1
AQTYPWGIPHIKADKAHAAGVTGSGVKVAILDTGIDANHADLNVKGGASFVSGEPNALQDGNGHGTHVAGTVAALNNTTGVLGVAYNADLYAVKVLSASGSGTLSGIAQGIEWSISNGMNVINMSLGGSSGSTALQQACNNAYNRGIVVIAAAGNSGSSGNRNTMGYPARYSSVIAVGAVSSNNTRASFSSVGSELEVMAPGVNILSTTPGNNYASFNGTSMAAPHVAGAAALIKAKYPSMTNVQIRERLKNTATNLGDPFFYGKGVINVESALQ

SEQ ID NO: 69332 - protein, 275 aa, Bacillus sp. LG1
AQTVPWGIPHIKADKAHAAGVTGSGVKVAILDTGIDANHADLNVKGGASFVSGEPNALQDGNGHGTHVAGTVAALNNTTGVLGVAYNADLYAVKVLSASGSGTLSGIAQGIEWSISNGMNVINMSIGGSSGSTALQQACNNAYNRGIVVIAAAGNSGSSGNRNTMGYPARYSSVIAVGAVSSNNTRASFSSVGSELEVMAPGVNILSTTPGNNYASFNGTSMAAPHVAGAAALIKAKYPSMTNVQIRERLKNTATNLGDPFFYGKGVINVESALQ

SEQ ID NO: 69333 - protein, 275 aa, Bacillus sp. LG1
AQTVPWGIPHIKADKAHAAGVTGSGVKVAILDTGIDANHADLNVKGGASFVSGEPNALQDGNGHGTHVAGTVAALNNTTGVLGVAYNADLYAVKVLSASGSGTLSGIAQGIEWSISNGMNVINMSLGGSSGSTALQQACNNAYNRGIVVIAAAGNSGSSGNRNTMGYPARYSSVIAVGAVSSNNTRASFSSVGSELEVMAPGVNILSTTPGNNYASFNGTSAAAPHVAGAAALIKAKYPSMTNVQIRERLKNTATNLGDPFFYGKGVINVESALQ

SEQ ID NO: 69334 - protein, 275 aa, Bacillus sp. LG1
AQTVPWGIPHIKADKAHAAGVTGSGVKVAILDTGIDANHADLNVKGGASFVSGEPNALQDGNGHGTHVAGTVAALNNTTGVLGVAYNADLYAVKVLSASGSGTLSGIAQGIEWSISNGMNVINMSGGGSSGSTALQQACNNAYNRGIVVIAAAGNSGSSGNRNTMGYPARYSSVIAVGAVSSNNTRASFSSVGSELEVMAPGVNILSTTPGNNYASFNGTSMAAPHVAGAAALIKAKYPSMTNVQIRERLKNTATNLGDPFFYGKGVINVESALQ

SEQ ID NO: 69335 - protein, 275 aa, Bacillus sp. LG1
AQTVPWGIPHIKADKAHAAGVTGSGVKVAILDTGIDANHADLNVKGGASFVSGEPNALQDGNGHGTHVAGTVAALNNTTGVLGVAYNADLYAVKVLSASGSGTLSGIAQGIEWSISNGMNVINMSLGGSSGSTALQQACNNAYNRGIVVIAAAGNIGSSGNRNTMGYPARYSSVIAVGAVSSNNTRASFSSVGSELEVMAPGVNILSTTPGNNYASFNGTSMAAPHVAGAAALIKAKYPSMTNVQIRERLKNTATNLGDPFFYGKGVINVESALQ

SEQ ID NO: 69336 - protein, 275 aa, Bacillus sp. LG1
AQTVPWGIPHIKADKAHAAGVTGSGVKVAILDTGIDANHADLNVKGGASFVSGEPNALQDGNGHGTHVAGTVAALNNTTGVLGVAYNADLYAVKVLSASGSGTLSEIAQGIEWSISNGMNVINMSLGGSSGSTALQQACNNAYNRGIVVIAAAGNSGSSGNRNTMGYPARYSSVIAVGAVSSNNTRASFSSVGSELEVMAPGVNILSTTPGNNYASFNGTSMAAPHVAGAAALIKAKYPSMTNVQIRERLKNTATNLGDPFFYGKGVINVESALQ

SEQ ID NO: 69337 - protein, 275 aa, Bacillus sp. LG1
AQVVPWGIPHIKADKAHAAGVTGSGVKVAILDTGIDANHADLNVKGGASFVSGEPNALQDGNGHGTHVAGTVAALNNTTGVLGVAYNADLYAVKVLSASGSGTLSGIAQGIEWSISNGMNVINMSLGGSSGSTALQQACNNAYNRGIVVIAAAGNSGSSGNRNTMGYPARYSSVIAVGAVSSNNTRASFSSVGSELEVMAPGVNILSTTPGNNYASFNGTSMAAPHVAGAAALIKAKYPSMTNVQIRERLKNTATNLGDPFFYGKGVINVESALQ

SEQ ID NO: 69338 - protein, 275 aa, Bacillus sp. LG1
AQTVPWGIPHIKADKAHAAGVTGSGVKVAILDTGIDANHADLNVKGGASFVSGEPNALQDGNGHGTHVAGTVAALNDTTGVLGVAYNADLYAVKVLSASGSGTLSGIAQGIEWSISNGMNVINMSLGGSSGSTALQQACNNAYNRGIVVIAAAGNSGSSGNRNTMGYPARYSSVIAVGAVSSNNTRASFSSVGSELEVMAPGVNILSTTPGNNYASFNGTSMAAPHVAGAAALIKAKYPSMTNVQIRERLKNTATNLGDPFFYGKGVINVESALQ

SEQ ID NO: 69339 - protein, 275 aa, Bacillus sp. LG1
AQTVPWGIPHIKADKAHAAGVTGSGVKVAILDTGIDANHADLNVKGGASFVSGEPNALQDGNGHGTHVAGTVAALNNTTGVLGVAYNADLYAVKVLSASGSGTLSGIAQGIEWSISNGMNVINMSLGGSSGSTALQQACNNAYNRGIVVIAAAGNSGSSGNRNTMGYPARYSSVIAVGASSSNNTRASFSSVGSELEVMAPGVNILSTTPGNNYASFNGTSMAAPHVAGAAALIKAKYPSMTNVQIRERLKNTATNLGDPFFYGKGVINVESALQ

SEQ ID NO: 69340 - protein, 275 aa, Bacillus sp. LG1
AQTVPWGIPHIKADKAHAAGVTGSGVKVAILDTGIDANHADLNVKGGASFVSGEPNALQDGNGHGTHVAGTVAALNNTTGVLGVAYNADLYAVKVLSASGSGTLSGIAQGIEWSISNGMNVINMSLGGSSSSTALQQACNNAYNRGIVVIAAAGNSGSSGNRNTMGYPARYSSVIAVGAVSSNNTRASFSSVGSELEVMAPGVNILSTTPGNNYASFNGTSMAAPHVAGAAALIKAKYPSMTNVQIRERLKNTATNLGDPFFYGKGVINVESALQ

SEQ ID NO: 69341 - protein, 275 aa, Bacillus sp. LG1
AQTVPWGIPHIKADKAHAAGVTGSGVKVAILDTGIDANHADLNVKGGASFVSGEPNALQDGNGHGTHVAGTVAALNNTTGVLGVAYNADLYAVKVLSASGSGTLSGIAQGIEWSISNGMNVINMSLGGSSGSTALQQACNNAYNRGIVVIAAAGNSGSSGNRNTMGYPARYSSVIAVGAVSSNNTRAYFSSVGSELEVMAPGVNILSTTPGNNYASFNGTSMAAPHVAGAAALIKAKYPSMTNVQIRERLKNTATNLGDPFFYGKGVINVESALQ

SEQ ID NO: 69342 - protein, 275 aa, Bacillus sp. LG1
AQTVPWGIPHIKADKAHAAGVTGSGVKVAILDTGIDANHADLNVKGGASFVSGEPNALQDGNGHGTHVAGTVAALNNTTGVLGVAYNADLYAVKVLSASGSGTLSGIAQGIEWSISNGMNVINMSLGGSSGSTALQQACNNAYNRGIVVIAAAGNSGSSGNRNTMGYPARYSSVIAVGAVSSNNTRASFSSVGSELEVMAPGVNILSTTPGNNYASFNGTSMAAPHVAGAAALIKAMYPSMTNVQIRERLKNTATNLGDPFFYGKGVINVESALQ

SEQ ID NO: 69343 - protein, 275 aa, Bacillus sp. LG1
AQTEPWGIPHIKADKAHAAGVTGSGVKVAILDTGIDANHADLNVKGGASFVSGEPNALQDGNGHGTHVAGTVAALNNTTGVLGVAYNADLYAVKVLSASGSGTLSGIAQGIEWSISNGMNVINMSLGGSSGSTALQQACNNAYNRGIVVIAAAGNSGSSGNRNTMGYPARYSSVIAVGAVSSNNTRASFSSVGSELEVMAPGVNILSTTPGNNYASFNGTSMAAPHVAGAAALIKAKYPSMTNVQIRERLKNTATNLGDPFFYGKGVINVESALQ

SEQ ID NO: 69344 - protein, 275 aa, Bacillus sp. LG1
AQTVPWGIPHIKADKAHAAGVTGSGVKVAILDTGIDANHADLNVKGGASFVSGEPNALQDGNGHGTHVAGTVAALNNTTGGLGVAYNADLYAVKVLSASGSGTLSGIAQGIEWSISNGMNVINMSLGGSSGSTALQQACNNAYNRGIVVIAAAGNSGSSGNRNTMGYPARYSSVIAVGAVSSNNTRASFSSVGSELEVMAPGVNILSTTPGNNYASFNGTSMAAPHVAGAAALIKAKYPSMTNVQIRERLKNTATNLGDPFFYGKGVINVESALQ

SEQ ID NO: 69345 - protein, 275 aa, Bacillus sp. LG1
AQTVPWGIPHIKADKAHAAGVTGSGVKVAILDTGIDANHADLNVKGGASFVSGEPNALQLGNGHGTHVAGTVAALNNTTGVLGVAYNADLYAVKVLSASGSGTLSGIAQGIEWSISNGMNVINMSLGGSSGSTALQQACNNAYNRGIVVIAAAGNSGSSGNRNTMGYPARYSSVIAVGAVSSNNTRASFSSVGSELEVMAPGVNILSTTPGNNYASFNGTSMAAPHVAGAAALIKAKYPSMTNVQIRERLKNTATNLGDPFFYGKGVINVESALQ

SEQ ID NO: 69346 - protein, 275 aa, Bacillus sp. LG1
AQTVPWGIPHIKADKAHAAGVTGSGVKVAILDTGIDSNHADLNVKGGASFVSGEPNALQDGNGHGTHVAGTVAALNNTTGVLGVAYNADLYAVKVLSASGSGTLSGIAQGIEWSISNGMNVINMSLGGSSGSTALQQACNNAYNRGIVVIAAAGNSGSSGNRNTMGYPARYSSVIAVGAVSSNNTRASFSSVGSELEVMAPGVNILSTTPGNNYASFNGTSMAAPHVAGAAALIKAKYPSMTNVQIRERLKNTATNLGDPFFYGKGVINVESALQ

SEQ ID NO: 69347 - protein, 275 aa, Bacillus sp. LG1
AQTVPWGIPHIKADKAHYAGVTGSGVKVAILDTGIDANHADLNVKGGASFVSGEPNALQDGNGHGTHVAGTVAALNNTTGVLGVAYNADLYAVKVLSASGSGTLSGIAQGIEWSISNGMNVINMSLGGSSGSTALQQACNNAYNRGIVVIAAAGNSGSSGNRNTMGYPARYSSVIAVGAVSSNNTRASFSSVGSELEVMAPGVNILSTTPGNNYASFNGTSMAAPHVAGAAALIKAKYPSMTNVQIRERLKNTATNLGDPFFYGKGVINVESALQ

SEQ ID NO: 69348 - protein, 275 aa, Bacillus sp. LG1
AQTVPWGIPHIKADKAHAAGVTGSGVKVAILDTGIDANHADLNVKGGASFVSGEPNALQDGNGHGTHVAGTVAALNNTTGVLGVAYNADLYAVKVLSASGSGTLSGIAQGIEWSISNGMNVINMSLGGSSGSFALQQACNNAYNRGIVVIAAAGNSGSSGNRNTMGYPARYSSVIAVGAVSSNNTRASFSSVGSELEVMAPGVNILSTTPGNNYASFNGTSMAAPHVAGAAALIKAKYPSMTNVQIRERLKNTATNLGDPFFYGKGVINVESALQ

SEQ ID NO: 69349 - protein, 275 aa, Bacillus sp. LG1
AQTVPWGIPHIKADKAHAAGVTGSGVKVAILDTGIDANHADLNVKGGASFVSGEPNALQDGNGHGTHVAGTVAALNNTTGVLGVAYNADLYAVKVLSASGSGTLSGIAQGIEWSISNGMNVINMSLGGSSGSTALQQACNNAYNRGIVVIAAAGNSGSSGNRNTMGYPARYSSVIAVGAVSSNNTRASFSSVGSELEVMAPGVNILSTTPGNNYASFNGTSMAAPHYAGAAALIKAKYPSMTNVQIRERLKNTATNLGDPFFYGKGVINVESALQ

SEQ ID NO: 69350 - protein, 275 aa, Bacillus sp. LG1
AQTVPWGIPHIKADKAHAAGVTGSGVKVAILDTGIDANHADLNVKGGASFVSGEPNALQDGNGHGTHVAGTVAALNNTTGVLGVAYNADLYAVKVLSASGSGTLSGIAQGIEWSISNGMNVINMSLGGSSGSTALQQACNNAYNRGIVVIAAAGNSGSSFNRNTMGYPARYSSVIAVGAVSSNNTRASFSSVGSELEVMAPGVNILSTTPGNNYASFNGTSMAAPHVAGAAALIKAKYPSMTNVQIRERLKNTATNLGDPFFYGKGVINVESALQ

SEQ ID NO: 69351 - protein, 275 aa, Bacillus sp. LG1
AQTVPWGIPHIKADKAHAAGVTGSGVKVAILDTGIDANHADLNVKGGASFFSGEPNALQDGNGHGTHVAGTVAALNNTTGVLGVAYNADLYAVKVLSASGSGTLSGIAQGIEWSISNGMNVINMSLGGSSGSTALQQACNNAYNRGIVVIAAAGNSGSSGNRNTMGYPARYSSVIAVGAVSSNNTRASFSSVGSELEVMAPGVNILSTTPGNNYASFNGTSMAAPHVAGAAALIKAKYPSMTNVQIRERLKNTATNLGDPFFYGKGVINVESALQ

SEQ ID NO: 69352 - protein, 275 aa, Bacillus sp. LG1
AQTVPWGIPHIKADKAHAAGVTGSGVKVAILDTGIDANHADLNVKGGASFVSGEPNALQDGNGHGTHVAGTVAALNNTTGVLGVAYNADLYAVKVLSASGSGTLSGIAQGIEWSISNGMNVINMSLGGSSGSTALQQACNNAYNRGIVVIAAAGNSGSSGNRNTMGYPARYSSVIAVGAVSSNNTRASFSSVGSELEVMAPGVNILSTTPGNNYGSFNGTSMAAPHVAGAAALIKAKYPSMTNVQIRERLKNTATNLGDPFFYGKGVINVESALQ

SEQ ID NO: 69353 - protein, 275 aa, Bacillus sp. LG1
AQTVPWGIPHIKADKAHAAGVTGSGVKVAILDTGIDANHADLNVKGGASFVSGEPNALQDGNGHGTHVAGTVAALNNTTGVLGVAYNADLYAVKVLSASGSGTLSGIAQGIEWSISNGMNVINMSLGGSSGSTALQQACNNAYNRGIVVIAAAGNSGSSGNRNTMGYPARYSSVIAVGAVSSNNTRASFSSVGSELEVMAPGVNILSTTPGNNYASFNGTSMAAPHVAGAAALIKAKYPSMTNVQIRERLKNTTTNLGDPFFYGKGVINVESALQ

SEQ ID NO: 69354 - protein, 275 aa, Bacillus sp. LG1
AQTVPWGIPHIKADKAHAAGVTGSGVKVAILDTGIDANHADLNVKGGASFVSGEPNALQDGNGHGTHVAGTVAALNNTTGVLGVAYNADLYAVKVLSASGSGTLSGIAQGIEWSISEGMNVINMSLGGSSGSTALQQACNNAYNRGIVVIAAAGNSGSSGNRNTMGYPARYSSVIAVGAVSSNNTRASFSSVGSELEVMAPGVNILSTTPGNNYASFNGTSMAAPHVAGAAALIKAKYPSMTNVQIRERLKNTATNLGDPFFYGKGVINVESALQ

SEQ ID NO: 69355 - protein, 275 aa, Bacillus sp. LG1
AQYVPWGIPHIKADKAHAAGVTGSGVKVAILDTGIDANHADLNVKGGASFVSGEPNALQDGNGHGTHVAGTVAALNNTTGVLGVAYNADLYAVKVLSASGSGTLSGIAQGIEWSISNGMNVINMSLGGSSGSTALQQACNNAYNRGIVVIAAAGNSGSSGNRNTMGYPARYSSVIAVGAVSSNNTRASFSSVGSELEVMAPGVNILSTTPGNNYASFNGTSMAAPHVAGAAALIKAKYPSMTNVQIRERLKNTATNLGDPFFYGKGVINVESALQ

SEQ ID NO: 69356 - protein, 275 aa, Bacillus sp. LG1
AQTVPWGIPHIKADKAHAAGVTGSGVKVAILDTGIDANHADLNVKGGASFVSGEPNALQDGNGHGTHVAGTVAALNNTTGVLGVAYNADLYAVKVLSASGSGTLSGIAQGIEWSISNGMNVINMSLGGSSGSTALQQACNNAYNRGIVVIAAAGNLGSSGNRNTMGYPARYSSVIAVGAVSSNNTRASFSSVGSELEVMAPGVNILSTTPGNNYASFNGTSMAAPHVAGAAALIKAKYPSMTNVQIRERLKNTATNLGDPFFYGKGVINVESALQ

SEQ ID NO: 69357 - protein, 275 aa, Bacillus sp. LG1
AQTVPWGIPHIKADKAHAAGVTGSGVKVAILDTGIDANHADLNVKGGASFVSGEPNALQDGNGHGTHVAGTVAALNNTTGVLGVAYNADLYAVKVLSASGSGTLSGIAQGIEWSISNGMNVINMSLGGSSGSTALQQACNNAYNRGIVHIAAAGNSGSSGNRNTMGYPARYSSVIAVGAVSSNNTRASFSSVGSELEVMAPGVNILSTTPGNNYASFNGTSMAAPHVAGAAALIKAKYPSMTNVQIRERLKNTATNLGDPFFYGKGVINVESALQ

SEQ ID NO: 69358 - protein, 275 aa, Bacillus sp. LG1
AQTVPWGIPHIKADKAHAAGVTGSGVKVAILDTGIDANHADLNVKGGASFVSGEPNALQDGNGHGTHVAGTVAALNNTTGVLGVAYNADLYAVKVHSASGSGTLSGIAQGIEWSISNGMNVINMSLGGSSGSTALQQACNNAYNRGIVVIAAAGNSGSSGNRNTMGYPARYSSVIAVGAVSSNNTRASFSSVGSELEVMAPGVNILSTTPGNNYASFNGTSMAAPHVAGAAALIKAKYPSMTNVQIRERLKNTATNLGDPFFYGKGVINVESALQ

SEQ ID NO: 69359 - protein, 275 aa, Bacillus sp. LG1
AQTVPWGIPHIKADKAHAAGVTGSGVKVAILDTGIDANHADLNVKGGASIVSGEPNALQDGNGHGTHVAGTVAALNNTTGVLGVAYNADLYAVKVLSASGSGTLSGIAQGIEWSISNGMNVINMSLGGSSGSTALQQACNNAYNRGIVVIAAAGNSGSSGNRNTMGYPARYSSVIAVGAVSSNNTRASFSSVGSELEVMAPGVNILSTTPGNNYASFNGTSMAAPHVAGAAALIKAKYPSMTNVQIRERLKNTATNLGDPFFYGKGVINVESALQ

SEQ ID NO: 69360 - protein, 275 aa, Bacillus sp. LG1
AQTVPWGIPHIKADKAHAAGVTGSGVKVAILDTGIDANHADLNVKGGASFVSGEPNALQDGNGHGTHVAGTVAALNNTTGVLGVAYNADLYALKVLSASGSGTLSGIAQGIEWSISNGMNVINMSLGGSSGSTALQQACNNAYNRGIVVIAAAGNSGSSGNRNTMGYPARYSSVIAVGAVSSNNTRASFSSVGSELEVMAPGVNILSTTPGNNYASFNGTSMAAPHVAGAAALIKAKYPSMTNVQIRERLKNTATNLGDPFFYGKGVINVESALQ

SEQ ID NO: 69361 - protein, 275 aa, Bacillus sp. LG1
AQTVPWGIPHIKADKAHAAGVTGSGVKVAILDTGIDANHADLNVKGGASFVSGEPNALQDGNGHGTHVAGPVAALNNTTGVLGVAYNADLYAVKVLSASGSGTLSGIAQGIEWSISNGMNVINMSLGGSSGSTALQQACNNAYNRGIVVIAAAGNSGSSGNRNTMGYPARYSSVIAVGAVSSNNTRASFSSVGSELEVMAPGVNILSTTPGNNYASFNGTSMAAPHVAGAAALIKAKYPSMTNVQIRERLKNTATNLGDPFFYGKGVINVESALQ

SEQ ID NO: 69362 - protein, 275 aa, Bacillus sp. LG1
AQTVPWGIPHIKADKAHAAGVTGSGVKVAILDTGIDANHADLNVKGGASFVSGEPNALQDGNGHGTHVAGTVAALNNTTGVLGVAYNADLYAVKVLSASGSGTLSGIAQGIEWSISNGSNVINMSLGGSSGSTALQQACNNAYNRGIVVIAAAGNSGSSGNRNTMGYPARYSSVIAVGAVSSNNTRASFSSVGSELEVMAPGVNILSTTPGNNYASFNGTSMAAPHVAGAAALIKAKYPSMTNVQIRERLKNTATNLGDPFFYGKGVINVESALQ

SEQ ID NO: 69363 - protein, 275 aa, Bacillus sp. LG1
AQTVPWGIPHIKADKAHAAGVTGSGVKVAILDTGIDANHADLNVKGGASFVSGEPNALQDGNGHGTHVAGTVAALNNTTGVLGVAYNADLYAVKVLSASGSGTLSGIAQGIEWSISNGMNVINMSLGGSSGSTALQQACNNAYNRGIVVIAAAGNSGSSGNRNTMGYPARYSSVIAVGAVSSNNTRASFSSVGSELEVMAPGVNILSTTPGNNYASFNGTSMAAPHVAGAAALIKAKYPSMTNVQIRERLKNTATNLGDPFFYGKGVINVHSALQ

SEQ ID NO: 69364 - protein, 275 aa, Bacillus sp. LG1
AQTVPWGIPHIKADKAHAAGVTGSGVKVAILDTGIDANHADLNVKGGASFVSGEPNALQDGNGHGTHVAGTVAALNNTTGVLGVAYNADLYAVKVLSASGSGTLSSIAQGIEWSISNGMNVINMSLGGSSGSTALQQACNNAYNRGIVVIAAAGNSGSSGNRNTMGYPARYSSVIAVGAVSSNNTRASFSSVGSELEVMAPGVNILSTTPGNNYASFNGTSMAAPHVAGAAALIKAKYPSMTNVQIRERLKNTATNLGDPFFYGKGVINVESALQ

SEQ ID NO: 69365 - protein, 275 aa, Bacillus sp. LG1
AQTVPWGIPHIKADKAHAAGVTGSGVKVAILDTGIDANHADLNVKGGASFVSGEPNALQDGNGHGTHVAGTVAALNNTTGVLGVAYNADLYAVKALSASGSGTLSGIAQGIEWSISNGMNVINMSLGGSSGSTALQQACNNAYNRGIVVIAAAGNSGSSGNRNTMGYPARYSSVIAVGAVSSNNTRASFSSVGSELEVMAPGVNILSTTPGNNYASFNGTSMAAPHVAGAAALIKAKYPSMTNVQIRERLKNTATNLGDPFFYGKGVINVESALQ

SEQ ID NO: 69366 - protein, 275 aa, Bacillus sp. LG1
AQTVPWGIPHIKADKAHAAGVTGSGVKVAILDTGIDANHADLNVKGGASFVSGEPNALQDGNGHGTHVAGTVAALNNTTGYLGVAYNADLYAVKVLSASGSGTLSGIAQGIEWSISNGMNVINMSLGGSSGSTALQQACNNAYNRGIVVIAAAGNSGSSGNRNTMGYPARYSSVIAVGAVSSNNTRASFSSVGSELEVMAPGVNILSTTPGNNYASFNGTSMAAPHVAGAAALIKAKYPSMTNVQIRERLKNTATNLGDPFFYGKGVINVESALQ

SEQ ID NO: 69367 - protein, 275 aa, Bacillus amyloliquefaciens
AQSVPYGVSQIKAPALHSQGYTGSNVKVAVIDSGIDSSHPDLKVAGGASMVPSETNPFQDNNSHGTHVAGTVAALNNSIGVLGVAPSASLYAVKVLGSSGSGQYSWIINGIEWAIANNMDVINMSLGGPSGSAALKAAVDKAVASGVVVVAAAGNEGTSGSSSTVGYPGKYPSVIAVGAVDSSNQRASFSSVGPELDVMAPGVSIQSTLPGNKYGALNGTSMASPHVAGAAALILSKHPNWTNTQVRSSLENTTTKLGDSFYYGKGLINVQAAAQ

SEQ ID NO: 69368 - protein, 275 aa, Bacillus sp. LG1
AQTVPWGIPHIKADKAHAAGVTGSGVKVAILDTGIDANHADLNVKGGASFVSGEPNALQDGNGHGTHVAGTVAALNNTTGVLGVAYNADLYAVEVLSASGSGTLSGIAQGIEWSISNGMNVINMSLGGSSGSTALQQACNNAYNRGIVVIAAAGNSGSSGNRNTMGYPARYSSVIAVGAVSSNNTRASFSSVGSELEVMAPGVNILSTTPGNNYASFNGTSMAAPHVAGAAALIKAKYPSMTNVQIRERLKNTATNLGDPFFYGKGVINVESALQ

SEQ ID NO: 69369 - protein, 275 aa, Bacillus sp. LG1
AQTVPWGIPHIKADKAHAAGVTGSGVKVAILDTGIDANHADLNVKGGASFVSGEPNALQDGNGHATHVAGTVAALNNTTGVLGVAYNADLYAVKVLSASGSGTLSGIAQGIEWSISNGMNVINMSLGGSSGSTALQQACNNAYNRGIVVIAAAGNSGSSGNRNTMGYPARYSSVIAVGAVSSNNTRASFSSVGSELEVMAPGVNILSTTPGNNYASFNGTSMAAPHVAGAAALIKAKYPSMTNVQIRERLKNTATNLGDPFFYGKGVINVESALQ

SEQ ID NO: 69370 - protein, 275 aa, Bacillus sp.
AQTVPWGIPHIKADKAHAAGVTGSGVKVAILDTGIDANHADLNVKGGASFVSGEPNALQDGNGHGTHVAGTVAALNNTTGVLGVAYNADLYAVKVLSASGSGTLSGIAQGIEWSISNGMNVINMSLGGSSGSTALQQACNNAYNRGIVVIAAAGNSGSSGNRNTMDYPARYSSVIAVGAVSSNNTRASFSSVGSELEVMAPGVNILSTTPGNNYASFNGTSMAAPHVAGAAALIKAKYPSMTNVQIRERLKNTATNLGDPFFYGKGVINVEKALQ

SEQ ID NO: 69371 - protein, 275 aa, Bacillus sp. LG1
AQTVPWGIPHIKADKAHAAGVTGSGVKVAITDTGIDANHADLNVKGGASFVSGEPNALQDGNGHGTHVAGTVAALNNTTGVLGVAYNADLYAVKVLSASGSGTLSGIAQGIEWSISNGMNVINMSLGGSSGSTALQQACNNAYNRGIVVIAAAGNSGSSGNRNTMGYPARYSSVIAVGAVSSNNTRASFSSVGSELEVMAPGVNILSTTPGNNYASFNGTSMAAPHVAGAAALIKAKYPSMTNVQIRERLKNTATNLGDPFFYGKGVINVESALQ

SEQ ID NO: 69372 - protein, 275 aa, Bacillus sp. LG1
AQTVPWGIPHIKADKAHAAGVTGSGVKVAILDTGIDANHADLNVKGGASFVSGEPNALQKGNGHGTHVAGTVAALNNTTGVLGVAYNADLYAVKVLSASGSGTLSGIAQGIEWSISNGMNVINMSLGGSSGSTALQQACNNAYNRGIVVIAAAGNSGSSGNRNTMGYPARYSSVIAVGAVSSNNTRASFSSVGSELEVMAPGVNILSTTPGNNYASFNGTSMAAPHVAGAAALIKAKYPSMTNVQIRERLKNTATNLGDPFFYGKGVINVESALQ

SEQ ID NO: 69373 - protein, 275 aa, Bacillus sp. LG1
AQTVPWGIPHIKADKAHAAGVTGSGVKVAILDTGIDANHADLNVKGGASQVSGEPNALQDGNGHGTHVAGTVAALNNTTGVLGVAYNADLYAVKVLSASGSGTLSGIAQGIEWSISNGMNVINMSLGGSSGSTALQQACNNAYNRGIVVIAAAGNSGSSGNRNTMGYPARYSSVIAVGAVSSNNTRASFSSVGSELEVMAPGVNILSTTPGNNYASFNGTSMAAPHVAGAAALIKAKYPSMTNVQIRERLKNTATNLGDPFFYGKGVINVESALQ

SEQ ID NO: 69374 - protein, 275 aa, Bacillus sp. LG1
AQTVPWGIPHIKADKAHAAGVTGSGVKVAILDTGIDANHADLNVKGGASFVSGEPNALQDGNGHGTHVAGTVAALNNTTGVLGVAYNADLYAVKVLSASGSGTLSGIAQGIEWSISNGMNVINMSLGGSSGSTALQQACNNAYNRGIVVIAAAGNSGQSGNRNTMGYPARYSSVIAVGAVSSNNTRASFSSVGSELEVMAPGVNILSTTPGNNYASFNGTSMAAPHVAGAAALIKAKYPSMTNVQIRERLKNTATNLGDPFFYGKGVINVESALQ

SEQ ID NO: 69375 - protein, 275 aa, Bacillus sp. LG1
AQTVPWGIPHIKADKAHAAGVTGSGVKVAILDTGIDANHADLNVKGGASFVSGEPNALQDGNGHGTHVAGTVAALNNTTGVLGVAYNADLYAVKVLSASGSGTLSGIAQGIEWSISNGMNVINMSLGGSSGSTALQQACNNAMNRGIVVIAAAGNSGSSGNRNTMGYPARYSSVIAVGAVSSNNTRASFSSVGSELEVMAPGVNILSTTPGNNYASFNGTSMAAPHVAGAAALIKAKYPSMTNVQIRERLKNTATNLGDPFFYGKGVINVESALQ

SEQ ID NO: 69376 - protein, 275 aa, Bacillus sp. LG1
AQTVPWGIPHIKADKAHAAGVTGSGVKVAILDTGIDANHADLNVKGGASFVSGEPNALQDGNGHGTHVAGTVAALNNTTGVLGVAYNADLYAVKVLSASGSGTLSGIAQGIEWSISNGMNVINMSLGGSSGSTALQQACNNAYNRGIVVIAAAGNSGSSGNRNTMGYPARYSSVIAVGAVSSNNTRASFSSVGSELEVMAPGVNILSTTPGNNYASFNGTSLAAPHVAGAAALIKAKYPSMTNVQIRERLKNTATNLGDPFFYGKGVINVESALQ

SEQ ID NO: 69377 - protein, 275 aa, Bacillus sp. LG1
AQTVPWGIPHIKADKAHAAGVTGSGVKVAILDTGIDANHADLNVKGGASFVSGEPNALQDGNGHGTHVAGTVAALNNTTGVLGVAYNADLYAVKVLSASGSGTLSGIAQGIEWSISNHMNVINMSLGGSSGSTALQQACNNAYNRGIVVIAAAGNSGSSGNRNTMGYPARYSSVIAVGAVSSNNTRASFSSVGSELEVMAPGVNILSTTPGNNYASFNGTSMAAPHVAGAAALIKAKYPSMTNVQIRERLKNTATNLGDPFFYGKGVINVESALQ

SEQ ID NO: 69378 - protein, 275 aa, Bacillus sp. LG1
AQTVPWGIPHIKADKAHAAGVTGSGVKVAILDTGIDANHADLNVKGGASFVSGEPNALQDGNGHGTHVAGTVAALNNTTGVLGVSYNADLYAVKVLSASGSGTLSGIAQGIEWSISNGMNVINMSLGGSSGSTALQQACNNAYNRGIVVIAAAGNSGSSGNRNTMGYPARYSSVIAVGAVSSNNTRASFSSVGSELEVMAPGVNILSTTPGNNYASFNGTSMAAPHVAGAAALIKAKYPSMTNVQIRERLKNTATNLGDPFFYGKGVINVESALQ

SEQ ID NO: 69379 - protein, 275 aa, Bacillus sp. LG1
AQTVPWGIPHIKADKAHAAQVTGSGVKVAILDTGIDANHADLNVKGGASFVSGEPNALQDGNGHGTHVAGTVAALNNTTGVLGVAYNADLYAVKVLSASGSGTLSGIAQGIEWSISNGMNVINMSLGGSSGSTALQQACNNAYNRGIVVIAAAGNSGSSGNRNTMGYPARYSSVIAVGAVSSNNTRASFSSVGSELEVMAPGVNILSTTPGNNYASFNGTSMAAPHVAGAAALIKAKYPSMTNVQIRERLKNTATNLGDPFFYGKGVINVESALQ

SEQ ID NO: 69380 - protein, 275 aa, Bacillus sp. LG1
AQTVPWGIPHIKADKAHAAGVTGSGVKVAILDTGIDANHADLNVKGGASFVSGEPNALQDGNGHGTHVAGTVAALNNTTGVLGVAYNADLYAVKVLSASGSGTLSGIAQGIEWSISNGMNVINMSLGGSSGSTALQQACNNAYNRGIVVIAAAGNSGSSGNRNTMGYPARYSSVIAVGAVSSNNTRASFSSVGSELEVMAPGVNILSTTPGNNYASFNGTSMAAPHVAGAAILIKAKYPSMTNVQIRERLKNTATNLGDPFFYGKGVINVESALQ

SEQ ID NO: 69381 - protein, 275 aa, Bacillus sp. LG1
AQTVPWGIPHIKADKAHAAGVTGSGVKVAILDTGIDANHADLNVKGGASFVSGEPNALQDGNGHGTHVAGTVAALNNTTGVLGVAYNADLYAVKVLSASGSGTLSGIAQGIEWSISNGMNVINMSLGGSSGSTALQQACNNAYNRGIVVIAAAGNNGSSGNRNTMGYPARYSSVIAVGAVSSNNTRASFSSVGSELEVMAPGVNILSTTPGNNYASFNGTSMAAPHVAGAAALIKAKYPSMTNVQIRERLKNTATNLGDPFFYGKGVINVESALQ

SEQ ID NO: 69382 - protein, 275 aa, Bacillus sp. LG1
AQTVPWGIPHIKADKAHAAGVTGSGVKVAILDTGIDANHADLNVKGGASFVSGEPNALQDGNGHGTHVAGTVAALNNTTGVLGVAYNADLYAVKVLSASGSGTLSGIAQGIEWSISNGMNVINMSLGGSSGSTALQQACNNAYNRGIVVIAAAGNSGSSVNRNTMGYPARYSSVIAVGAVSSNNTRASFSSVGSELEVMAPGVNILSTTPGNNYASFNGTSMAAPHVAGAAALIKAKYPSMTNVQIRERLKNTATNLGDPFFYGKGVINVESALQ

SEQ ID NO: 69383 - protein, 275 aa, Bacillus sp. LG1
AQTVPWGIPHIKADKAHAAGVTGSGVKVAILDTGMDANHADLNVKGGASFVSGEPNALQDGNGHGTHVAGTVAALNNTTGVLGVAYNADLYAVKVLSASGSGTLSGIAQGIEWSISNGMNVINMSLGGSSGSTALQQACNNAYNRGIVVIAAAGNSGSSGNRNTMGYPARYSSVIAVGAVSSNNTRASFSSVGSELEVMAPGVNILSTTPGNNYASFNGTSMAAPHVAGAAALIKAKYPSMTNVQIRERLKNTATNLGDPFFYGKGVINVESALQ

SEQ ID NO: 69384 - protein, 275 aa, Bacillus sp. LG1
AQTVPWGIPHIKADKAHAAGVTGSGVKVAILDTGIDANHADLNVKGGASFVSGEPNALQDGNGHGTHVAGTVAALNNTTGVLGVAYNADLYAVKVLSASGSGTLSGIAQGIEWSISNGMNVINMSLGGSSGSTALQQACNNAYNRGIVVIAAAGNSGSSGNRNTMGYPARYSSVIAVGAVSSNNTRASFSSVGSELEVMAPGVNILSTTPGNNYASFNGTSMAAPHVAGHAALIKAKYPSMTNVQIRERLKNTATNLGDPFFYGKGVINVESALQ

SEQ ID NO: 69385 - protein, 275 aa, Bacillus sp. LG1
AQTVPWGIPHIKADKAHAAGVTGSGVKVAILDTGIDANHADLNVKGGASFVSGEPNALQDGNGHGTHVAGTVAALNNTTGVLGVAYNADLYAVKVLSASGSGTLSGIAQGIEWSISNGMNVINMSLGGSSGSTALQQACNNAYNRGIVVIAAAGNSGSSGNRNTMGYPARYSSVIAVGAVSSNNTRASFSSVGSELEVMAPGVNILSTTPGNNYESFNGTSMAAPHVAGAAALIKAKYPSMTNVQIRERLKNTATNLGDPFFYGKGVINVESALQ

SEQ ID NO: 69386 - protein, 275 aa, Bacillus sp. LG1
AQTVPWGIPHIKADKAHAAGVTGSGVKVAILDTGIDANHADLNVKGGASFVSGEPNALQDGNGHGTHVAGTVAALNNTTGVLGVAYNADLYAVKVLSASGSGTLSGIAQGIEWSISNGMNVINMSLGGSSGSTALQQACNNAYNRGIVVIAAAGNSGSSGNRNTMGYPARYSSVIAVGAVSSNNTRASFSSVGSELEVMAPGVNILSNTPGNNYASFNGTSMAAPHVAGAAALIKAKYPSMTNVQIRERLKNTATNLGDPFFYGKGVINVESALQ

SEQ ID NO: 69387 - protein, 275 aa, Bacillus sp. LG1
AQTVPWGIPHIKADKAHAAGVTGSGVKVAILDTGIDANHADLNVKGGASFVSGEPNALQDGNGHGTHDAGTVAALNNTTGVLGVAYNADLYAVKVLSASGSGTLSGIAQGIEWSISNGMNVINMSLGGSSGSTALQQACNNAYNRGIVVIAAAGNSGSSGNRNTMGYPARYSSVIAVGAVSSNNTRASFSSVGSELEVMAPGVNILSTTPGNNYASFNGTSMAAPHVAGAAALIKAKYPSMTNVQIRERLKNTATNLGDPFFYGKGVINVESALQ

SEQ ID NO: 69388 - protein, 275 aa, Bacillus sp. LG1
AQTVPWGIPHIKADKAHAAGVTGSGVKVAILDTGIDANHADLYVKGGASFVSGEPNALQDGNGHGTHVAGTVAALNNTTGVLGVAYNADLYAVKVLSASGSGTLSGIAQGIEWSISNGMNVINMSLGGSSGSTALQQACNNAYNRGIVVIAAAGNSGSSGNRNTMGYPARYSSVIAVGAVSSNNTRASFSSVGSELEVMAPGVNILSTTPGNNYASFNGTSMAAPHVAGAAALIKAKYPSMTNVQIRERLKNTATNLGDPFFYGKGVINVESALQ

SEQ ID NO: 69389 - protein, 275 aa, Bacillus sp. LG1
AQTVPWGIPHIKADKAHAAGVTGSGVKVAILDTGIDANHADLNVKGGASFVSGEPNALQDGNGHGTHVAGTVAALNNTTGVLGVAYNADLYAVKVLSASGSGTLSGIAQGIEWSISNGMNVINMSLGGSSGSTALQQACNNAYNRGIVVIAAAGNSGSSGNRNTMGYPARYSSVIAVGAVSSNNTRASFSSVGSELEVMAPGVNILSTTPGNNYASFNGTSMAAPHVAGAAALIKAKYPSMTNVQIRERLKNTATNLGDPFFWGKGVINVESALQ

SEQ ID NO: 69390 - protein, 275 aa, Bacillus sp. LG1
AQTVPWGIPHIKADKAHAAGVTGSGVKVAILDTGIDANHADLNVKGGASFVSGEPNALQDGNGHGTHVAGTVAALNNTTGVLGVAYNADLYAVKVLSASGSGTLSGIAQGIEWSISNGMNVINMSLGGSSGSTALQQACNNAYNRGIVVIAAAGNSGSSGNRNTMGYPARYSSVIAVGAVSSNNTRASFSSVGSELEVMAPGVNILSTTPGNNYASFNGTSMAAPHVAGAAALIKARYPSMTNVQIRERLKNTATNLGDPFFYGKGVINVESALQ

SEQ ID NO: 69391 - protein, 275 aa, Bacillus sp. LG1
AQTVPWGIPHIKADKAHAAGVTGSGVKVAILDTGIDANHADLNVKGGASFVSGEPNALQDGNGHGTHVAGTVAALNNTTGVLGVAYNADLYAVKVLSASGSGTLSGIAQGIEWSISNGMNVINMSLGGSSGSTALQQACNNAYNRGIVVIAAAGNSGSSGNRNTMGYPARYSSVIAVGAVSSNNTRASFSSVGSELEVMAPGVNILSTTPGNNYASFNGTSMAAPHVAGAAALIKAKYPSMTNVQIRERLKNTATNLGDPFFYGKGVINVMSALQ

SEQ ID NO: 69392 - protein, 275 aa, Bacillus sp. LG1
AQTVPWGIPHIKADKAHAAGVTGSGVKVAILDTGIDANHADLNVKGGASFVSGEPNALQDGNGHGTHVAGTVAALNNTTGVLGVAYNADLYAVKVLSASGSGTLSGIAQGIEWSISNGMNVINMSLGGSSGSTALQQACNNAYNRGIVVIAAAGNSGSSGNRNTMGYPARYSSVIAVGAVSSNNTRASFSSVGSELEVMASGVNILSTTPGNNYASFNGTSMAAPHVAGAAALIKAKYPSMTNVQIRERLKNTATNLGDPFFYGKGVINVESALQ

SEQ ID NO: 69393 - protein, 275 aa, Bacillus sp. LG1
AQTVPWGIPHIKADKAHAAGVTGSGVKVAILDTGIDANHADLNVKGGASFVSGEPNALQDGNGHGTHVAGTVAALNNTTGVLGVAYNADLYAVKVLSASGSGTLSGIAQGIEWSISNGMNVINMSLGGSSGSMALQQACNNAYNRGIVVIAAAGNSGSSGNRNTMGYPARYSSVIAVGAVSSNNTRASFSSVGSELEVMAPGVNILSTTPGNNYASFNGTSMAAPHVAGAAALIKAKYPSMTNVQIRERLKNTATNLGDPFFYGKGVINVESALQ

SEQ ID NO: 69394 - protein, 275 aa, Bacillus sp. LG1
AQTVPWGIPHIKADKAHAAGVTGSGVKVAILDTGIDANHADLNVKGGASFVSGEPNALQDGNGHGTHVAGTVAALNNTTGVLGVAYNADLYAVKVLSASGSGTLSGIAQGIEWSISNGMNVINMSLGGSSGSTALQQACNNAYNRGIVVIAAAGNSGSSGNRNTMGYPARYSSVIAVGAVSSNNTRGSFSSVGSELEVMAPGVNILSTTPGNNYASFNGTSMAAPHVAGAAALIKAKYPSMTNVQIRERLKNTATNLGDPFFYGKGVINVESALQ

SEQ ID NO: 69395 - protein, 275 aa, Bacillus sp. LG1
AQTVPWGIPHIKADKAHAAGVTGSGVKVAILDTGIDANHADLNVKGGASFVSGEPNALQDGNGHGTHVAGTVAALNNTTGVLGVAYNADLYAVKVLSASGSGTLSGIAQGIEWSISNGMNVINMSLGGSSGSTALQQACNNAYNRGIVVIAAAGNSGSSGNRNTMGYPARYSSVIAVGAVSSNNTRASFSSVGSELEVMAPGVNILSTTPGNNYASFNGTSMAAPEVAGAAALIKAKYPSMTNVQIRERLKNTATNLGDPFFYGKGVINVESALQ

SEQ ID NO: 69396 - protein, 275 aa, Bacillus sp. LG1
AQTVPWGIPHIKADKAHAAGVTGSGVKVAILDTGIDANHADLNVKGGASFVSGEPNALQDGNGHGTHVAGTVAALNNTTGVLGVAYNADLYAVKVLSASGSGTLSGIAQGIEWSISNGMNVINMSLGGSSGSTALQQACNNAYNRGIVVIAAAGNSGSSGWRNTMGYPARYSSVIAVGAVSSNNTRASFSSVGSELEVMAPGVNILSTTPGNNYASFNGTSMAAPHVAGAAALIKAKYPSMTNVQIRERLKNTATNLGDPFFYGKGVINVESALQ

SEQ ID NO: 69397 - protein, 275 aa, Bacillus sp. LG1
AQTVPWGIPHIKADKAHAAGVTGSGVKVAILDTGIDANHADLNVKGGASFVSGEPNALQDGNGHGTHVAGTVAALNNTTGVLGVAYNADLYAVKVLSASGSGTLSGIAQGIEWSISNGMNVINMSLGGSSGSTALQQACNNAYNRGIVVIAAAGNSGSSGNRNTMGYPARGSSVIAVGAVSSNNTRASFSSVGSELEVMAPGVNILSTTPGNNYASFNGTSMAAPHVAGAAALIKAKYPSMTNVQIRERLKNTATNLGDPFFYGKGVINVESALQ

SEQ ID NO: 69398 - protein, 275 aa, Bacillus sp. LG1
AQTVPWGIPHIKADKAHAAGVTGSGVKVAILDTGIDANHADLNVKGGASFVSGEPNALQDGNGHGTHVAGTVAALNNTTGVLGVAYNADLYAVKVLSASGSGTLSGIAQGIEWSISNGMNVINMSLGGSSGSTALQQACNNAYNRGIVVIAAAGNSGSSGNRNTMGYPARYSSVIAVGAVSSNNTRASFSSVGSELEVMAPGVNILSTTPGNNYASFNGTSMAAPHVAGAAALIKAKYPSMTNVQIRERLKNTATNLGDPFFYGKGVINVKSALQ

SEQ ID NO: 69399 - protein, 275 aa, Bacillus sp. LG1
AQTVPWGIPHIKADKAHAAGVTGSGVKVAILDTGIDANHADLNVKGGASFVSGEPNALQDGNGHGTHVAGTVAALNNTTGVLGVAYNADLYAVKVLSASGSGTLSGIAQGIEWSISNGMNVINMSLGGSSGSTALQQACNNAYNRGIVVIAAAGNSGSSGSRNTMGYPARYSSVIAVGAVSSNNTRASFSSVGSELEVMAPGVNILSTTPGNNYASFNGTSMAAPHVAGAAALIKAKYPSMTNVQIRERLKNTATNLGDPFFYGKGVINVESALQ

SEQ ID NO: 69400 - protein, 275 aa, Bacillus sp. LG1
AQTVPWGIPHIKADKAHAAGVTGSGVKVAILDTGIDANHADLNVKGGASFVSGEPNALQDGKGHGTHVAGTVAALNNTTGVLGVAYNADLYAVKVLSASGSGTLSGIAQGIEWSISNGMNVINMSLGGSSGSTALQQACNNAYNRGIVVIAAAGNSGSSGNRNTMGYPARYSSVIAVGAVSSNNTRASFSSVGSELEVMAPGVNILSTTPGNNYASFNGTSMAAPHVAGAAALIKAKYPSMTNVQIRERLKNTATNLGDPFFYGKGVINVESALQ

SEQ ID NO: 69401 - protein, 275 aa, Bacillus sp. LG1
AQTVPWGIPHIKADKAHAAGVTGSGVKVAILDTGIDANHADLNVKGGASFVSGEPNALQDGNGHGTHVAGTVAALNNTTGVLGVAYNADLYAVKVLSASGSGTLSGIAQGIEWSISNGMNVINMSLGGSSGSTALQQACNNAYNRGIVVIAAAGNSGSSGNRNTMGYPARYSSVIAVGAVSSNNTRASFSSVGSELEVMAPGVNILSTTPGNNYASFNGTSMAAPHVAGAAALIKAKYLSMTNVQIRERLKNTATNLGDPFFYGKGVINVESALQ

SEQ ID NO: 69402 - protein, 275 aa, Bacillus sp. LG1
AQTVPWGIPHIKADKAHAAGVTGSGVKVAILDTGIDANHADLNVKGGASFVSGEPNALQDGNGHGTHVAGTVAALNNTTGVLGVAYNADLYAVKVLSASGSGTLSGIAQGIEWSISNGMNVINMSLGGSSGSTALQQACNNAYNRGIVVIAAAGNSGSSGNRNTMGYPARYSSVIAVGAVSSNNTRASFSSVGSELEVMAPGVNILSTTPGNNYASFNGTSMAAPHVAGAAALIKAKYFSMTNVQIRERLKNTATNLGDPFFYGKGVINVESALQ

SEQ ID NO: 69403 - protein, 275 aa, Bacillus sp. LG1
AQTVPWGIPHIKAYKAHAAGVTGSGVKVAILDTGIDANHADLNVKGGASFVSGEPNALQDGNGHGTHVAGTVAALNNTTGVLGVAYNADLYAVKVLSASGSGTLSGIAQGIEWSISNGMNVINMSLGGSSGSTALQQACNNAYNRGIVVIAAAGNSGSSGNRNTMGYPARYSSVIAVGAVSSNNTRASFSSVGSELEVMAPGVNILSTTPGNNYASFNGTSMAAPHVAGAAALIKAKYPSMTNVQIRERLKNTATNLGDPFFYGKGVINVESALQ

SEQ ID NO: 69404 - protein, 275 aa, Bacillus sp. LG1
AQTVPWGIPHIKADKAHAAGVTGSGVKVAILDTGIDANHADLNVKGGASFVSGEPNALQDGNGHGTHVAGTVAALNNTTGVLGVAYNADLYAVKVLSASGSGTLSGIAQGIEWSISNGMNVINMSLGGSSGSTALQQACNNAYNRGIVVIAAAGNSGSSGNRNTMGYPARYSSVIAVGAVSSNNTRASFSSVGSELEVMAPGVNILSTTPGINYASFNGTSMAAPHVAGAAALIKAKYPSMTNVQIRERLKNTATNLGDPFFYGKGVINVESALQ

SEQ ID NO: 69405 - protein, 275 aa, Bacillus sp. LG1
AQTVPWGIPHIKADKAHAAGVTGSGVKVAILDTGIDANHADLNVKGGASFVSGEPNALQPGNGHGTHVAGTVAALNNTTGVLGVAYNADLYAVKVLSASGSGTLSGIAQGIEWSISNGMNVINMSLGGSSGSTALQQACNNAYNRGIVVIAAAGNSGSSGNRNTMGYPARYSSVIAVGAVSSNNTRASFSSVGSELEVMAPGVNILSTTPGNNYASFNGTSMAAPHVAGAAALIKAKYPSMTNVQIRERLKNTATNLGDPFFYGKGVINVESALQ

SEQ ID NO: 69406 - protein, 275 aa, Bacillus sp. LG1
AQTVPWGIPHIKADKAHAAGVTGSGVKVAILDTGIDANHADLNVKGGASFVSGEPNALQDGNGHGTNVAGTVAALNNTTGVLGVAYNADLYAVKVLSASGSGTLSGIAQGIEWSISNGMNVINMSLGGSSGSTALQQACNNAYNRGIVVIAAAGNSGSSGNRNTMGYPARYSSVIAVGAVSSNNTRASFSSVGSELEVMAPGVNILSTTPGNNYASFNGTSMAAPHVAGAAALIKAKYPSMTNVQIRERLKNTATNLGDPFFYGKGVINVESALQ

SEQ ID NO: 69407 - protein, 275 aa, Bacillus sp. LG1
AQTVPWGIPHIKADKAHAAGVTGSGVKVAILDTGIDANHADLNVKGGASFVSGEPNALQDGNGHGTHVAGTVAALNNTTFVLGVAYNADLYAVKVLSASGSGTLSGIAQGIEWSISNGMNVINMSLGGSSGSTALQQACNNAYNRGIVVIAAAGNSGSSGNRNTMGYPARYSSVIAVGAVSSNNTRASFSSVGSELEVMAPGVNILSTTPGNNYASFNGTSMAAPHVAGAAALIKAKYPSMTNVQIRERLKNTATNLGDPFFYGKGVINVESALQ

SEQ ID NO: 69408 - protein, 275 aa, Bacillus sp. LG1
AQTVPWGIPHIKADKAHAAGVTGSGVKVAILDTGIDANHADLNVKGGASFVSGEPNALQFGNGHGTHVAGTVAALNNTTGVLGVAYNADLYAVKVLSASGSGTLSGIAQGIEWSISNGMNVINMSLGGSSGSTALQQACNNAYNRGIVVIAAAGNSGSSGNRNTMGYPARYSSVIAVGAVSSNNTRASFSSVGSELEVMAPGVNILSTTPGNNYASFNGTSMAAPHVAGAAALIKAKYPSMTNVQIRERLKNTATNLGDPFFYGKGVINVESALQ

SEQ ID NO: 69409 - protein, 275 aa, Bacillus sp. LG1
AQTVPWGIPHIKADKAHAAGVTGSGVKVAILDTGIDANHADLNVKGGASFVSGEPNALQDGNGHGTHVAGTEAALNNTTGVLGVAYNADLYAVKVLSASGSGTLSGIAQGIEWSISNGMNVINMSLGGSSGSTALQQACNNAYNRGIVVIAAAGNSGSSGNRNTMGYPARYSSVIAVGAVSSNNTRASFSSVGSELEVMAPGVNILSTTPGNNYASFNGTSMAAPHVAGAAALIKAKYPSMTNVQIRERLKNTATNLGDPFFYGKGVINVESALQ

SEQ ID NO: 69410 - protein, 275 aa, Bacillus sp. LG1
AQTVPWGIPHIKADKAHAAGVTGSGVKVAILDTGIDANHADLNVKGGASFVSGEPNALQDGNGHGTHVAGTVAALNNTTGVLGVAYNADLYAVKVLSASGSGTLSGIAQGIEWSISNGMNVINMSLGGSSGSTALQQACNNAYNRGIVVIAAAGNSGSSGNRNTMGYPARYSSVIAVGAVSSNNTRASFSSVGSELEVMAPGVNILSTTPGNNYASFNGTSMAAPHVAGAAALIKAKYPSMTNVQIRERTKNTATNLGDPFFYGKGVINVESALQ

SEQ ID NO: 69411 - protein, 275 aa, Bacillus sp. LG1
AQTVPWGIPHIKADKAHAAGVTGSGVKVAILDTGIDANHADLNVKGGASFVSGEPNALQDGNGHGTHVAGTVAALNNTTGVLGVAYNADLYAVKVLSASGSGTLSGIAQGIEWSISNGMNVINMSLGGSSGSTALQQACNNAYNRGIVVIAAAGNSGSSGNRNTMGYPARYSSVIAVGAVSSNNTRASFSSVGSELEVMAPGVNILSTTPGNNYASFNGTSMAAPHVAGAFALIKAKYPSMTNVQIRERLKNTATNLGDPFFYGKGVINVESALQ

SEQ ID NO: 69412 - protein, 275 aa, Bacillus sp. LG1
AQTVPWGIPHIKADKAHAAGVTGSGVKVAILDTGIDANHADLNVKGGASFVSGEPNALQDGNGHGTHVAGTVAALNNTTGVLGVAYNADLYAVKVLSASGRGTLSGIAQGIEWSISNGMNVINMSLGGSSGSTALQQACNNAYNRGIVVIAAAGNSGSSGNRNTMGYPARYSSVIAVGAVSSNNTRASFSSVGSELEVMAPGVNILSTTPGNNYASFNGTSMAAPHVAGAAALIKAKYPSMTNVQIRERLKNTATNLGDPFFYGKGVINVESALQ

SEQ ID NO: 69413 - protein, 275 aa, Bacillus sp. LG1
AQTVPWGIPHIKADKAHAAGVTGSGVKVAILDTGIDANHADLNVKGGASFVSGEPNALQDGNGHGTHVAGTVAALNNTTGVLGVAYNADLYAVKVLSASGSGTLSGIAQGIEWSISNGMNVINMSLGGSSGSTALQQACNNAYNRGIVVIAAAGNAGSSGNRNTMGYPARYSSVIAVGAVSSNNTRASFSSVGSELEVMAPGVNILSTTPGNNYASFNGTSMAAPHVAGAAALIKAKYPSMTNVQIRERLKNTATNLGDPFFYGKGVINVESALQ

SEQ ID NO: 69414 - protein, 275 aa, Bacillus sp. LG1
AQTVPWGIPHIKADKAHAAGVTGSGVKVAILDTGIDANHADLNVKGGASFVSGEPNALQDGNGHGTHVAGTVAALNNTTGVLGVAYNADLYAVKVLSASGSGTLSGIAQGIEWSISNGMNVINMSLGGSSGSTALQQACNNAYNRGIVVIAAAGNSGSYGNRNTMGYPARYSSVIAVGAVSSNNTRASFSSVGSELEVMAPGVNILSTTPGNNYASFNGTSMAAPHVAGAAALIKAKYPSMTNVQIRERLKNTATNLGDPFFYGKGVINVESALQ

SEQ ID NO: 69415 - protein, 275 aa, Bacillus sp. LG1
AQTVPWGIPHIKADKAHAAGVTGSGVKVAILDTGADANHADLNVKGGASFVSGEPNALQDGNGHGTHVAGTVAALNNTTGVLGVAYNADLYAVKVLSASGSGTLSGIAQGIEWSISNGMNVINMSLGGSSGSTALQQACNNAYNRGIVVIAAAGNSGSSGNRNTMGYPARYSSVIAVGAVSSNNTRASFSSVGSELEVMAPGVNILSTTPGNNYASFNGTSMAAPHVAGAAALIKAKYPSMTNVQIRERLKNTATNLGDPFFYGKGVINVESALQ

SEQ ID NO: 69416 - protein, 275 aa, Bacillus sp. LG1
AQTVPWGIPHIKADKAHAAGVTGSGVKVAILDTGIDANHADLNVKGGASFVSGEPNALQDGNGHGTHVAGTVAALNNTTGVLGVAYNADLYAVKVLSASGSGTLSGIAQGIEWSISNGMNVINMSLGGSSGSTALQQACNNAYNRGIVVIAAAGNSGSSGNRNTMGYPARYSSVIAVGAVSSNNTRASFSSVGSELEVMAPGVNILSTTPGNNYMSFNGTSMAAPHVAGAAALIKAKYPSMTNVQIRERLKNTATNLGDPFFYGKGVINVESALQ

SEQ ID NO: 69417 - protein, 275 aa, Bacillus sp. LG1
AQTVPWGIPHIKADKAHAAGVTGSGVKVAILDTGIDANHADLNVKGGASFVSGEPNALQDGNGHGTHVAGTVAAANNTTGVLGVAYNADLYAVKVLSASGSGTLSGIAQGIEWSISNGMNVINMSLGGSSGSTALQQACNNAYNRGIVVIAAAGNSGSSGNRNTMGYPARYSSVIAVGAVSSNNTRASFSSVGSELEVMAPGVNILSTTPGNNYASFNGTSMAAPHVAGAAALIKAKYPSMTNVQIRERLKNTATNLGDPFFYGKGVINVESALQ

SEQ ID NO: 69418 - protein, 275 aa, Bacillus sp. LG1
AQTVPWGIPHIKADKAHAAGVTGSGVKVAILDTGIDANHADLNVKGGASFVSGEPNALQDGNGHGTHVAGTVAALNNTTGVLGVAYNADLYAVKVLSASGSGTLSGIAQGIEWSISNGMNVINMSLGGSSGSTALQQACNNAYNRGIVVIAAAGNSGSSGNRNTMGYPARYSSVIAVGAVSSNNTRASFSSVGSELEVMAPGVNILSTTPGNNYASFNGTSMAAPHVAGAAALIKAKYPSMTNVQIRERLKNTAGNLGDPFFYGKGVINVESALQ

SEQ ID NO: 69419 - protein, 275 aa, Bacillus sp. LG1
AQTVPWGIPHIKADKAHAAGVTGSGVKVAILDTGIDANHADLNVKGGASFVSGEPNALQDGNGHGTHVAGTVAALNNTTGVLGVAYNADLYAVKVLSASGSGTLSGIAQGIEWSISNQMNVINMSLGGSSGSTALQQACNNAYNRGIVVIAAAGNSGSSGNRNTMGYPARYSSVIAVGAVSSNNTRASFSSVGSELEVMAPGVNILSTTPGNNYASFNGTSMAAPHVAGAAALIKAKYPSMTNVQIRERLKNTATNLGDPFFYGKGVINVESALQ

SEQ ID NO: 69420 - protein, 275 aa, Bacillus sp. LG1
AQTVPWGIPHITADKAHAAGVTGSGVKVAILDTGIDANHADLNVKGGASFVSGEPNALQDGNGHGTHVAGTVAALNNTTGVLGVAYNADLYAVKVLSASGSGTLSGIAQGIEWSISNGMNVINMSLGGSSGSTALQQACNNAYNRGIVVIAAAGNSGSSGNRNTMGYPARYSSVIAVGAVSSNNTRASFSSVGSELEVMAPGVNILSTTPGNNYASFNGTSMAAPHVAGAAALIKAKYPSMTNVQIRERLKNTATNLGDPFFYGKGVINVESALQ

SEQ ID NO: 69421 - protein, 275 aa, Bacillus sp. LG1
AQTVPWGIPHIEADKAHAAGVTGSGVKVAILDTGIDANHADLNVKGGASFVSGEPNALQDGNGHGTHVAGTVAALNNTTGVLGVAYNADLYAVKVLSASGSGTLSGIAQGIEWSISNGMNVINMSLGGSSGSTALQQACNNAYNRGIVVIAAAGNSGSSGNRNTMGYPARYSSVIAVGAVSSNNTRASFSSVGSELEVMAPGVNILSTTPGNNYASFNGTSMAAPHVAGAAALIKAKYPSMTNVQIRERLKNTATNLGDPFFYGKGVINVESALQ

SEQ ID NO: 69422 - protein, 275 aa, Bacillus sp. LG1
AQTVPWGIPHIKADKAHAAGVTGSGVKVAILDTGIDANHADLNVKGGASFVSGEPNALQDGNGHGTHVAGTVAALNNTTGVLGVAYNADLYAVKVLSASGSGTLSGIAQGIEWSISNGMNVINMSLGGSSGSTALQQACNNAYNRGIVVIAAAGNSGSSGNRNTMGYPARYSSVIAVGAVSSNNTRASFSSVGSELEVMAPGVNILSTTPGNNYASFNGTSMAAPHVAGAAALYKAKYPSMTNVQIRERLKNTATNLGDPFFYGKGVINVESALQ

SEQ ID NO: 69423 - protein, 275 aa, Bacillus sp.
AQTVPWGIPHIKADKAHAAGVTGSGVKVAILDTGIDANHADLNVKGGASFVSDEPNALQDGNGHGTHVAGTVAALDNTTGVLGVAYNADLYAVKVLSASGSGTLSGIAQGIEWSISNGMNVINMSLGGSSGSTALQQACNNAYNRGIVVIAAAGNSGSSGNRNTMDYPARYSSVIAVGAVSSNNTRASFSSVGSELEVMAPGVNILSTTPGNNYASFNGTSMAAPHVAGAAALIKAKYPSMTNVQIRERLKNTATRLGDPFFYGKGVINVEKALQ

SEQ ID NO: 69424 - protein, 275 aa, Bacillus sp. LG1
AQTVPWGIPHIKADKAHAAGVTGSGVKVAILDTGIDANHADLNVKGGASFVSGEPNALQDGNGHGTHVAGTVAALNNTTGVLGVAYNADLYAVKVLSASGSGTLSGIAQGIEWSISNGMNVINMSLGGSSGSTALQQACNNAENRGIVVIAAAGNSGSSGNRNTMGYPARYSSVIAVGAVSSNNTRASFSSVGSELEVMAPGVNILSTTPGNNYASFNGTSMAAPHVAGAAALIKAKYPSMTNVQIRERLKNTATNLGDPFFYGKGVINVESALQ

SEQ ID NO: 69425 - protein, 275 aa, Bacillus sp. LG1
AQTVPWGIPHIKADKAHAAGVTGSGVKVAILDTGIDANHADLNVKGGASFVSGEPNALQDGNGHGTHVAGTVAALNNTTGVLGVAYNADLYAVKVLSASGSGTLSGIAQGIEWSISNGMNVINMSLGGSSGSTALQQACNNAYNRGIVVIAAAGNSGSSGNRNTMGYPARYSSVIAVGAVSLNNTRASFSSVGSELEVMAPGVNILSTTPGNNYASFNGTSMAAPHVAGAAALIKAKYPSMTNVQIRERLKNTATNLGDPFFYGKGVINVESALQ

SEQ ID NO: 69426 - protein, 275 aa, Bacillus sp. LG1
AQTVPWGIPHIKADKAHAAGVTGSGVKVAILDTGIDANHADLNVKGGASFVSGEPNALQDGNGHGTHVAGTVAALNNTTGVLGVAYNADLYAVKVLSASGSGTLSGIAQGIEWSISNGMNVINMSLGGSSGSTALQQACNNAYNRGIVFIAAAGNSGSSGNRNTMGYPARYSSVIAVGAVSSNNTRASFSSVGSELEVMAPGVNILSTTPGNNYASFNGTSMAAPHVAGAAALIKAKYPSMTNVQIRERLKNTATNLGDPFFYGKGVINVESALQ

SEQ ID NO: 69427 - protein, 275 aa, Bacillus sp. LG1
AQTVPWGIPHIKADKAHAAGVTGSGVKVAILDTGIDANHADLNVKGGASFVSGEPNALQDGNGHGTHVAGTVAALNNTTGVLGVAYNADLYAVKVLSASGSGTLSGIAQGIEWSISNGMNVINMSLGGSSGSTALQQACNNAYNRGIVVIAAAGNSGSSGNRNTMGYPARYSSVIAVGAVSSNNTRASFSSVGSELEVMAPGVNILSTTPGNNYASFNGTSMAAPHVAGAAALIKAQYPSMTNVQIRERLKNTATNLGDPFFYGKGVINVESALQ

SEQ ID NO: 69428 - protein, 275 aa, Bacillus sp. LG1
AQTVPWGIPHIKADKAHAAGVTGSGVKVAILDTGIDANHADLNVKGGASFVSGEPNALQDGNGHGTHVAGTVAALNNTTGVLGVAYNADLYAVKVLSASGSGTLSGIAQGIEWSISNGMNVINMSLGGSSGSTALQQACNNAYNRGIVVIAAAGNSGSSGNRNTMGYPARYSSVIAVGAVSSNNTRASFSSVGSELEVMAPGVNILSTTPGNNYKSFNGTSMAAPHVAGAAALIKAKYPSMTNVQIRERLKNTATNLGDPFFYGKGVINVESALQ

SEQ ID NO: 69429 - protein, 275 aa, Bacillus sp. LG1
AQTVPWGIPHIKADKAHAAGVTGSGVKVAILDTGIDANHADLNVKGGASFVSGEPNALQDGNGHGTHVAGTVAALNNTTGVLGVAYNADLYAVKVLSASGSGTLSGIAQGIEWSISNGMNVINMSLGGSSGSTALQQACNNAYNRGIVVIAAAGNSGSSGNRNTMGYPARYSSVIAVGAVSSNNTRASFSSVGSELEVMAPGVNILSTTPGNNYASFNGTSMAAPHVAGAAALIKAKYPSMTNVQIRERLKNTATNLGDPFFYGKGVINLESALQ

SEQ ID NO: 69430 - protein, 275 aa, Bacillus sp. LG1
AQTVPWGIPHIKADKAHAAGVTGSGVKVAILDTGIDANHADLNVKGGASFVSGEPNALQDGNGHGTHVAGTVAALNNTTGVLGVAYNADLYAVKVLSASGSGTLSGIAQGIEWSISNGMNVINMSLGGSSGSTALQQACNNAYNRGIVVIAAAGNSGSSGNRNTMGYPARYSSVIAVGAVSSNNTRASFSSVGSELEVMAPGVNILSTTPGNNYASFNGTSMAAPHVAGAYALIKAKYPSMTNVQIRERLKNTATNLGDPFFYGKGVINVESALQ

SEQ ID NO: 69431 - protein, 275 aa, Bacillus sp. LG1
AQTVPWGIPHIKADKAHAAGVTGSGVKVAILDTGIDANHADLNVKGGASFVSGEPNALQDGNTHGTHVAGTVAALNNTTGVLGVAYNADLYAVKVLSASGSGTLSGIAQGIEWSISNGMNVINMSLGGSSGSTALQQACNNAYNRGIVVIAAAGNSGSSGNRNTMGYPARYSSVIAVGAVSSNNTRASFSSVGSELEVMAPGVNILSTTPGNNYASFNGTSMAAPHVAGAAALIKAKYPSMTNVQIRERLKNTATNLGDPFFYGKGVINVESALQ

SEQ ID NO: 69432 - protein, 275 aa, Bacillus sp. LG1
AQTPPWGIPHIKADKAHAAGVTGSGVKVAILDTGIDANHADLNVKGGASFVSGEPNALQDGNGHGTHVAGTVAALNNTTGVLGVAYNADLYAVKVLSASGSGTLSGIAQGIEWSISNGMNVINMSLGGSSGSTALQQACNNAYNRGIVVIAAAGNSGSSGNRNTMGYPARYSSVIAVGAVSSNNTRASFSSVGSELEVMAPGVNILSTTPGNNYASFNGTSMAAPHVAGAAALIKAKYPSMTNVQIRERLKNTATNLGDPFFYGKGVINVESALQ

SEQ ID NO: 69433 - protein, 275 aa, Bacillus sp. LG1
AQTVPWGIPHIKADKAHAAGVTGSGVKVAILDTGIDANHADLNVKGGASFVSGEPNALQDGNGHGTHVAGTVAALNNTTGVLGVAYNADLYAVKVLSASGSGTLSGIAQGIEWSISNGMNVINMSLGGSSGSTALQQACNNATNRGIVVIAAAGNSGSSGNRNTMGYPARYSSVIAVGAVSSNNTRASFSSVGSELEVMAPGVNILSTTPGNNYASFNGTSMAAPHVAGAAALIKAKYPSMTNVQIRERLKNTATNLGDPFFYGKGVINVESALQ

SEQ ID NO: 69434 - protein, 275 aa, Bacillus sp. LG1
AQTVPWGIPHIKADKAHAAGVTGSGVKVAILDTGIDANHADLNVKGGASFVSGEPNALQDGNGHGTHVAGTVAALNNTTGMLGVAYNADLYAVKVLSASGSGTLSGIAQGIEWSISNGMNVINMSLGGSSGSTALQQACNNAYNRGIVVIAAAGNSGSSGNRNTMGYPARYSSVIAVGAVSSNNTRASFSSVGSELEVMAPGVNILSTTPGNNYASFNGTSMAAPHVAGAAALIKAKYPSMTNVQIRERLKNTATNLGDPFFYGKGVINVESALQ

SEQ ID NO: 69435 - protein, 275 aa, Bacillus sp. LG1
AQTVPWGIPHIKADKAHAAGVTGSGVKVAILDTGIDANHADLNVKGGASFVSGEPNALQDGNGHGTHVAGTVAALNNTTGVLGVAYNADLYAVKVLSASGSGTLSGIAQGIEWSISNGMNVINMSLGGSSGSTALQQACNNAYNRGIVVIAAAGNSGSSGNRNTMGYPARYSSVIAVGAVSSNNTRASFSSVGSELEVMAPGVNILSTTPGNNYASFNGTSMAAPHVAGAAALIKAKYPSMTNVQIRERLKNNATNLGDPFFYGKGVINVESALQ

SEQ ID NO: 69436 - protein, 275 aa, Bacillus sp. LG1
AQTVPWGIPHIKADKAHAAGVTGSGVKVAILDTGIDANHADLNVKGGASFVSGEPNALQDGNGHGTHVAGTVAANNNTTGVLGVAYNADLYAVKVLSASGSGTLSGIAQGIEWSISNGMNVINMSLGGSSGSTALQQACNNAYNRGIVVIAAAGNSGSSGNRNTMGYPARYSSVIAVGAVSSNNTRASFSSVGSELEVMAPGVNILSTTPGNNYASFNGTSMAAPHVAGAAALIKAKYPSMTNVQIRERLKNTATNLGDPFFYGKGVINVESALQ

SEQ ID NO: 69437 - protein, 275 aa, Bacillus sp. LG1
AQTVPWGIPHIKADKAHAAGVTGSGVKVAILDTGIDANHADLNVKGGASFVSGEPNALQDGNWHGTHVAGTVAALNNTTGVLGVAYNADLYAVKVLSASGSGTLSGIAQGIEWSISNGMNVINMSLGGSSGSTALQQACNNAYNRGIVVIAAAGNSGSSGNRNTMGYPARYSSVIAVGAVSSNNTRASFSSVGSELEVMAPGVNILSTTPGNNYASFNGTSMAAPHVAGAAALIKAKYPSMTNVQIRERLKNTATNLGDPFFYGKGVINVESALQ

SEQ ID NO: 69438 - protein, 275 aa, Bacillus sp. LG1
AQTVPWGIPHIKADKAHAAGVTGSGVKVAILDTGIDANHADLNVKGGASFVSGEPNALQDGNGHGTHVAGTVAALNNTTGVLGVAYNADLYAVKVLSASGSGTLSGIAQGIEWSISNGMNVINMSLGGSSGSTALQQACNNAYNRGIVVIAAAGNSGSSGRRNTMGYPARYSSVIAVGAVSSNNTRASFSSVGSELEVMAPGVNILSTTPGNNYASFNGTSMAAPHVAGAAALIKAKYPSMTNVQIRERLKNTATNLGDPFFYGKGVINVESALQ

SEQ ID NO: 69439 - protein, 275 aa, Bacillus sp. LG1
AQTVPWGIPHIKADKAHAAGVTGSGVKVAILDTGIDANHADLNVKGGASFVSGEPNALQDGNYHGTHVAGTVAALNNTTGVLGVAYNADLYAVKVLSASGSGTLSGIAQGIEWSISNGMNVINMSLGGSSGSTALQQACNNAYNRGIVVIAAAGNSGSSGNRNTMGYPARYSSVIAVGAVSSNNTRASFSSVGSELEVMAPGVNILSTTPGNNYASFNGTSMAAPHVAGAAALIKAKYPSMTNVQIRERLKNTATNLGDPFFYGKGVINVESALQ

SEQ ID NO: 69440 - protein, 275 aa, Bacillus sp. LG1
AQTVPWGIPHIKADKAHAAGVTGSGVKVAILDTGIDANHADLNVKGGASFVSGEPNALQDGNGHGTHVAGTVAALNNTTGVLGVAYNADLYAVKVLSASGSGTLSGIAQGIEWSISNGMNVINMSLGGSSGSTALQQACNNAYNRGIVVIAAAGNSGSSGNRNTMGYPARYSSVIAVGAVSSNNTRASFSSVGSELEVMAPGVNILSTTPGNNYASFNGTSMAAPHVAGAAALSKAKYPSMTNVQIRERLKNTATNLGDPFFYGKGVINVESALQ

SEQ ID NO: 69441 - protein, 275 aa, Bacillus sp. LG1
AQTVPWGIPHIKADKAHAAGVTGSGVKVAILDTGIDANHADLNVKGGASFVSGEPNALQDGNGHGTHVAGTVAALNNTTGVLGVAYNADLYAVKVLSASGSGTLSGIAQGIEWSISNGMNVINMSLGGSSGSTALQQACNNAYNRGIVVIAAAGNSGSSGNRNTMGYPARYSSVIAVGAVSSNNTRASFSSVGSELEVMAPGVNILSTTPGNNYASFNGTSMAAPHVAGAAALIKAKYPSMTNVFIRERLKNTATNLGDPFFYGKGVINVESALQ

SEQ ID NO: 69442 - protein, 275 aa, Bacillus sp. LG1
AQTVPWGIPHIKADKAHAAGVTGSGVKVAILDTGIDANHADLNVKGGASFVSGEPNALQDGNGHGTHVAGTVAALNNTTGVLGVAYNADLYAVKVLSASGSGTLSGIAQGIEWSISNGMNVINMSLGGSSGSTALQQACNNAYNRGIVVIAAAGNSGSSGNRNTMGYPARYSSVIAVGAVSSNNTRASFSSVGSELEVMAPGVNILSTTPGNNYASFNGTSMAAPHVAGAAALIKAKYPSMTNVQIRERLKNTAYNLGDPFFYGKGVINVESALQ

SEQ ID NO: 69443 - protein, 275 aa, Bacillus sp. LG1
AQTVPWGIPHIKADKAHAAGVTGSGVKVAILDTGIDANHADLNVKGGASFVSGEPNALQDGNGHGTHVAGTVAALNNTTGVLGVAYNADLYAVKVLSASGSGTLSGIAQGIEWSISNGMNVINMSLGGSSGSTALQQACNNAYNRGIVVIAAAGNSGSSGNRNTMGPPARYSSVIAVGAVSSNNTRASFSSVGSELEVMAPGVNILSTTPGNNYASFNGTSMAAPHVAGAAALIKAKYPSMTNVQIRERLKNTATNLGDPFFYGKGVINVESALQ

SEQ ID NO: 69444 - protein, 275 aa, Bacillus sp. LG1
AQTVPWGIPHIKADKAHAAGVTGSGVKVAILDTGIDANHADLNVKGGASFVSGEPNALQDGNGHGTHVAGTVAAKNNTTGVLGVAYNADLYAVKVLSASGSGTLSGIAQGIEWSISNGMNVINMSLGGSSGSTALQQACNNAYNRGIVVIAAAGNSGSSGNRNTMGYPARYSSVIAVGAVSSNNTRASFSSVGSELEVMAPGVNILSTTPGNNYASFNGTSMAAPHVAGAAALIKAKYPSMTNVQIRERLKNTATNLGDPFFYGKGVINVESALQ

SEQ ID NO: 69445 - protein, 275 aa, Bacillus sp. LG1
AQTVPWGIPHIKADKAHAAGVTGSGVKVAILDTGIDANHADLNVKGGASFVSGEPNALQDGNGHGTHVAGTVAALNNTTGVLAVAYNADLYAVKVLSASGSGTLSGIAQGIEWSISNGMNVINMSLGGSSGSTALQQACNNAYNRGIVVIAAAGNSGSSGNRNTMGYPARYSSVIAVGAVSSNNTRASFSSVGSELEVMAPGVNILSTTPGNNYASFNGTSMAAPHVAGAAALIKAKYPSMTNVQIRERLKNTATNLGDPFFYGKGVINVESALQ

SEQ ID NO: 69446 - protein, 275 aa, Bacillus sp. LG1
AQTVPWGIPHIKADKAHAAGVTGSGVKVAILDTGIDANHADLQVKGGASFVSGEPNALQDGNGHGTHVAGTVAALNNTTGVLGVAYNADLYAVKVLSASGSGTLSGIAQGIEWSISNGMNVINMSLGGSSGSTALQQACNNAYNRGIVVIAAAGNSGSSGNRNTMGYPARYSSVIAVGAVSSNNTRASFSSVGSELEVMAPGVNILSTTPGNNYASFNGTSMAAPHVAGAAALIKAKYPSMTNVQIRERLKNTATNLGDPFFYGKGVINVESALQ

SEQ ID NO: 69447 - protein, 275 aa, Bacillus sp. LG1
AQTVPWGIPHIKADKAHAAGVTGSGVKVAILDTGIDANHADLNVKGGASFVSGEPNALQDGNGHGTHVAGTVAALNNTTGVLGVAYNADLYAVKVLSASGSGTLSGIAQGIEWSISNGMNVINMSLGGSSGSTALQQACNNAYNRGIVVIAAAGNSGSSGNRNTMGYPARYSSVIAVGAVSSNNTRASFSSVGSELEVMAPGVNILSTTPGNNYASFNGTSMAAPHVAGAAHLIKAKYPSMTNVQIRERLKNTATNLGDPFFYGKGVINVESALQ

SEQ ID NO: 69448 - protein, 275 aa, Bacillus sp. LG1
AQTVPWGIPHIKADKAHAAGVTGSGVKVAILDTGIDANHADLNVKGGASFVSGEPNALQDGNGHGTHVAGTVAALNNTTGVLGVAYNADLYAVKVLSASGSGTLSGIAQGIEWSISNGMNVINMSLGGSSGSTALQQACNNAYNRGIVVIAAAGNSGSSGNRNTMGYPARYSSVIAVGAVSSNNTRPSFSSVGSELEVMAPGVNILSTTPGNNYASFNGTSMAAPHVAGAAALIKAKYPSMTNVQIRERLKNTATNLGDPFFYGKGVINVESALQ

SEQ ID NO: 69449 - protein, 275 aa, Bacillus sp. LG1
AQTVPWGIPHIKADKAHAAGVTGSGVKVAILDTGIDANHADLNVKGGASFVSGEPNALQDGNGHGTHVAGGVAALNNTTGVLGVAYNADLYAVKVLSASGSGTLSGIAQGIEWSISNGMNVINMSLGGSSGSTALQQACNNAYNRGIVVIAAAGNSGSSGNRNTMGYPARYSSVIAVGAVSSNNTRASFSSVGSELEVMAPGVNILSTTPGNNYASFNGTSMAAPHVAGAAALIKAKYPSMTNVQIRERLKNTATNLGDPFFYGKGVINVESALQ

SEQ ID NO: 69450 - protein, 275 aa, Bacillus sp. LG1
AQTVPWGIPHIKADKAHAAGVTGSGVKVAILDTGIDANHADLNVKGGASFVSAEPNALQDGNGHGTHVAGTVAALNNTTGVLGVAYNADLYAVKVLSASGSGTLSGIAQGIEWSISNGMNVINMSLGGSSGSTALQQACNNAYNRGIVVIAAAGNSGSSGNRNTMGYPARYSSVIAVGAVSSNNTRASFSSVGSELEVMAPGVNILSTTPGNNYASFNGTSMAAPHVAGAAALIKAKYPSMTNVQIRERLKNTATNLGDPFFYGKGVINVESALQ

SEQ ID NO: 69451 - protein, 275 aa, Bacillus sp. LG1
AQTVPWGIPHIKADKAHAAGVTGSGVKVAILDTGIDANHADLNVKGGASFVSGEPNALQDGNGHGTHVAGTVAALNNITGVLGVAYNADLYAVKVLSASGSGTLSGIAQGIEWSISNGMNVINMSLGGSSGSTALQQACNNAYNRGIVVIAAAGNSGSSGNRNTMGYPARYSSVIAVGAVSSNNTRASFSSVGSELEVMAPGVNILSTTPGNNYASFNGTSMAAPHVAGAAALIKAKYPSMTNVQIRERLKNTATNLGDPFFYGKGVINVESALQ

SEQ ID NO: 69452 - protein, 275 aa, Bacillus sp. LG1
AQTVPWGIPHIKADKAHAAGVTGSGVKVAILDTGIDANHADLNVKGGASFVSGEPNALQDGNGHGTHVAGTVAALNNWTGVLGVAYNADLYAVKVLSASGSGTLSGIAQGIEWSISNGMNVINMSLGGSSGSTALQQACNNAYNRGIVVIAAAGNSGSSGNRNTMGYPARYSSVIAVGAVSSNNTRASFSSVGSELEVMAPGVNILSTTPGNNYASFNGTSMAAPHVAGAAALIKAKYPSMTNVQIRERLKNTATNLGDPFFYGKGVINVESALQ

SEQ ID NO: 69453 - protein, 275 aa, Bacillus sp. LG1
AQTVPWGIPHIKADKAHAAGVTGSGVKVAILDTGIDANHADLNVKGGASFVSGEPNALQDGNGHGTHVAGTVAALNNTTGVLGVAYNADLYAVKVLSASGSGTLSGIAQGIEWSISNGMNVINMSLGGSSGSTALQQACNNAYNRGIVVIAAAGNSGSSGNRNTMGYPARYSSVIAVGAVSSNNTRASFSSVGSELEVMAPGVNILSTTPGNNYASFNGTSMAAPHSAGAAALIKAKYPSMTNVQIRERLKNTATNLGDPFFYGKGVINVESALQ

SEQ ID NO: 69454 - protein, 275 aa, Bacillus sp. LG1
AQTVPWGIPHIKADKAHAAGVTGSGVKVAILDTGIDANHADLNVKGGASFVSGEPNALQDGNGHGTHVAGTVAALNNTTGVLGVAYNADLYAVKVLSASGSGTLSGIAQGIEWSISNGMNVINMSLGNSSGSTALQQACNNAYNRGIVVIAAAGNSGSSGNRNTMGYPARYSSVIAVGAVSSNNTRASFSSVGSELEVMAPGVNILSTTPGNNYASFNGTSMAAPHVAGAAALIKAKYPSMTNVQIRERLKNTATNLGDPFFYGKGVINVESALQ

SEQ ID NO: 69455 - protein, 275 aa, Bacillus sp. LG1
AQTVPWGIPHIKADKAHAAGVTGSGVKVAILDTGIDANHADLNVKGGASFVSGEPNALQDGNGHGTHVAGTVAALNNTTGVLGVAYNADLYAVKVLSASGSGTLSGIAQGIEWSISNGMNVINMSLGGSSGSTALQQACNNAYNRGIVVIAAAGNSGSSGNRNTMGYPARYSSVIAVGAVSSNNTRASFSSVGSELEVMAPGVNILSTTPGNNGASFNGTSMAAPHVAGAAALIKAKYPSMTNVQIRERLKNTATNLGDPFFYGKGVINVESALQ

SEQ ID NO: 69456 - protein, 275 aa, Bacillus sp. LG1
AQTVPWGIPHIKADKAHAAGVTGSGVKVAILDTGIDANHADLNVKGGASFVSGEPNALQDGNGHGTHVAGTVAALNNTTGVLGVAYNADLYAVKVLSASGSGTLSGIAQGIEWSISNGMNVINMSLGGSSGSTALQQACNNAYNRGIVVIAAAGNSGSSGNRNTMGYPARYSSVIAVGAVSSNNTRASFSSVGSELEVMAPGVNILSTTPGNNYASFNGTSMAAPHVAGAAALIKAKYPSMTNVQIRERLKNTATNPGDPFFYGKGVINVESALQ

SEQ ID NO: 69457 - protein, 275 aa, Bacillus sp. LG1
AQTVPWGIPHIKADKAHAAGVTGSGVKVAILDTGIDANHADLNVKGGASFVSGEPNALQDGNGHGTHVAGTVAALNNTTGVLGVAYNADLYAVKVESASGSGTLSGIAQGIEWSISNGMNVINMSLGGSSGSTALQQACNNAYNRGIVVIAAAGNSGSSGNRNTMGYPARYSSVIAVGAVSSNNTRASFSSVGSELEVMAPGVNILSTTPGNNYASFNGTSMAAPHVAGAAALIKAKYPSMTNVQIRERLKNTATNLGDPFFYGKGVINVESALQ

SEQ ID NO: 69458 - protein, 275 aa, Bacillus amyloliquefaciens
AQSVPYGVSQIKAPALHSQGYTGSNVKVAVIDSGIDSSHPDLKVAGGASMVPGESXAFQDNNSHGTHVAGTVAALNNSTGVLGVAPSASLYAVKVLGADGSGQYSWIINGIEWAIANNMDVINMSLGGPSGSAALKAAVDKAVASGVVVVAAAGNEGTSGSSSTVGYPGKYPSVIAVGAVDSSNQRASFSSVGPELDVMAPGVSIQSTLPGNKYGALNGTSMASPHVAGAAALILSKHPNWTNTQVRSSLENTTTKLGDSFYYGKGLINVQAAAQ

SEQ ID NO: 69459 - protein, 275 aa, Bacillus sp. LG1
AQTVPWGIPHIKADKAHAAGVTGSGVKVAILDTGIDANHADLNVKGGASFVSGEPNALQDGNGHGTHVAGTVAALNNTTGVLGVAYNADLYAVKVLSASGSGTLSGIAQGIEWSISNGMNVINMSLGGSSGSTALQQACNNAYNRGIVVIAAAGNSGSSGNRNTMGYPARYSSVIAVGAVSSNNTRASFSSVGSELEVMAPGVNILSTTPGWNYASFNGTSMAAPHVAGAAALIKAKYPSMTNVQIRERLKNTATNLGDPFFYGKGVINVESALQ

SEQ ID NO: 69460 - protein, 275 aa, Bacillus sp. LG1
AQTVPWGIPHIKADKAHAAGVTGSGVKVAILDTGIDANHADLNVKGGASFVSGEPNALQDGNGHGTHVAGTVAALNNTTGVLGVAYNADLYAVKVLSASGSGTLSGIAQGIEWSISNGMNVINMSLGGSNGSTALQQACNNAYNRGIVVIAAAGNSGSSGNRNTMGYPARYSSVIAVGAVSSNNTRASFSSVGSELEVMAPGVNILSTTPGNNYASFNGTSMAAPHVAGAAALIKAKYPSMTNVQIRERLKNTATNLGDPFFYGKGVINVESALQ

SEQ ID NO: 69461 - protein, 275 aa, Bacillus sp. LG1
AQTVPWGIPHIKADKAHAAGVTGSGVKVAILDTGIDANHADLNVKGGASFVSGEPNALQDGNGHGTHVAGTVVALNNTTGVLGVAYNADLYAVKVLSASGSGTLSGIAQGIEWSISNGMNVINMSLGGSSGSTALQQACNNAYNRGIVVIAAAGNSGSSGNRNTMGYPARYSSVIAVGAVSSNNTRASFSSVGSELEVMAPGVNILSTTPGNNYASFNGTSMAAPHVAGAAALIKAKYPSMTNVQIRERLKNTATNLGDPFFYGKGVINVESALQ

SEQ ID NO: 69462 - protein, 275 aa, Bacillus sp. LG1
AQTVPWGIPHIKADKAHAAGVTGSGVKVAILDTGIDANHADLNVKGGASFVSGEPNALQDGNGHGTHVAGTVAALNNTTGVLGVAYNADLYAVKVLSASGSGTLSGIAQGIEWSISNGMNVINMSLGGSFGSTALQQACNNAYNRGIVVIAAAGNSGSSGNRNTMGYPARYSSVIAVGAVSSNNTRASFSSVGSELEVMAPGVNILSTTPGNNYASFNGTSMAAPHVAGAAALIKAKYPSMTNVQIRERLKNTATNLGDPFFYGKGVINVESALQ

SEQ ID NO: 69463 - protein, 275 aa, Bacillus sp. LG1
AQTVPWGIPHIKADKAHAAGVTGSGVKVAILDTGIDANHADLNVKGGAWFVSGEPNALQDGNGHGTHVAGTVAALNNTTGVLGVAYNADLYAVKVLSASGSGTLSGIAQGIEWSISNGMNVINMSLGGSSGSTALQQACNNAYNRGIVVIAAAGNSGSSGNRNTMGYPARYSSVIAVGAVSSNNTRASFSSVGSELEVMAPGVNILSTTPGNNYASFNGTSMAAPHVAGAAALIKAKYPSMTNVQIRERLKNTATNLGDPFFYGKGVINVESALQ

SEQ ID NO: 69464 - protein, 275 aa, Bacillus sp. LG1
AQTVPWGIPHIKADKAHAAGVTGSGVKVAILDTGIDANHADLNVKGGASFVSGEPNALQDGNGHGTHVAGTVAALNNTTGVLGVAYNADLYAVKVLSASGSGTLSGIAQGIEWSISNGMNVINMSLGGSSGSTALQQACNNAYNRGIVVIAAAGNSGSMGNRNTMGYPARYSSVIAVGAVSSNNTRASFSSVGSELEVMAPGVNILSTTPGNNYASFNGTSMAAPHVAGAAALIKAKYPSMTNVQIRERLKNTATNLGDPFFYGKGVINVESALQ

SEQ ID NO: 69465 - protein, 275 aa, Bacillus sp. LG1
AQTVPWGIPHIKADKAHAAGVTGSGVKVAILDTGIDANHADLNVKGGASFVSGEPNALQDGNGHGTHVAGTVAALNNTTGVLGVAYNADLYAVKVLSASGSGTLSGIAQGIEWSISNGMNVINMSLGGSSGSTALQQACNNAYNRGIVVIAAAGNSGSSGNRNTMGYPARYSSVIAVGGVSSNNTRASFSSVGSELEVMAPGVNILSTTPGNNYASFNGTSMAAPHVAGAAALIKAKYPSMTNVQIRERLKNTATNLGDPFFYGKGVINVESALQ

SEQ ID NO: 69466 - protein, 275 aa, Bacillus sp. LG1
AQTVPWGIPHIKADKAHAAGVTGSGVKVAILDTGIDANHADLIVKGGASFVSGEPNALQDGNGHGTHVAGTVAALNNTTGVLGVAYNADLYAVKVLSASGSGTLSGIAQGIEWSISNGMNVINMSLGGSSGSTALQQACNNAYNRGIVVIAAAGNSGSSGNRNTMGYPARYSSVIAVGAVSSNNTRASFSSVGSELEVMAPGVNILSTTPGNNYASFNGTSMAAPHVAGAAALIKAKYPSMTNVQIRERLKNTATNLGDPFFYGKGVINVESALQ

SEQ ID NO: 69467 - protein, 275 aa, Bacillus sp. LG1
AQTVPWGIPHIKADKAHAAGVTGSGVKVAILDTGIDANHADLNVKGGASFVSGEPNALQDGNGHGTHVAGTVAALNNTTGVLGVAYNADLYAVKVLSASGSGTLSGIAQGIEWSISNGMNVINMSLGGSSGSTALQQACNNAYNRGIVVIAAAGNSGSSGNRNTMGYPARYSSVIAVGAVSSNNTRASNSSVGSELEVMAPGVNILSTTPGNNYASFNGTSMAAPHVAGAAALIKAKYPSMTNVQIRERLKNTATNLGDPFFYGKGVINVESALQ

SEQ ID NO: 69468 - protein, 275 aa, Bacillus sp. LG1
AQTVPWGIPHIKADKAHAAGVTGSGVKVAILDTGIDANHADLNVKGGASFVSGEPNALQDGNGHGTHVAGTVAALNNTTGVLGVAYNADLYAVKVLSASGSGTLSGIAQGIEWSISNGMNVINMSLGGSSGSTALQQACNNAYNRGIVVIQAAGNSGSSGNRNTMGYPARYSSVIAVGAVSSNNTRASFSSVGSELEVMAPGVNILSTTPGNNYASFNGTSMAAPHVAGAAALIKAKYPSMTNVQIRERLKNTATNLGDPFFYGKGVINVESALQ

SEQ ID NO: 69469 - protein, 275 aa, Bacillus sp. LG1
AQTVPWGIPHIKADKAHAAGVTGSGVKVAILDTGIDANHADLNVKGGASFVSGEPNALQDGNGHGTHVAGTVAALNNTTGVLGVAYNADLTAVKVLSASGSGTLSGIAQGIEWSISNGMNVINMSLGGSSGSTALQQACNNAYNRGIVVIAAAGNSGSSGNRNTMGYPARYSSVIAVGAVSSNNTRASFSSVGSELEVMAPGVNILSTTPGNNYASFNGTSMAAPHVAGAAALIKAKYPSMTNVQIRERLKNTATNLGDPFFYGKGVINVESALQ

SEQ ID NO: 69470 - protein, 275 aa, Bacillus sp. LG1
AQTVPWGIPHIKADKAHAAEVTGSGVKVAILDTGIDANHADLNVKGGASFVSGEPNALQDGNGHGTHVAGTVAALNNTTGVLGVAYNADLYAVKVLSASGSGTLSGIAQGIEWSISNGMNVINMSLGGSSGSTALQQACNNAYNRGIVVIAAAGNSGSSGNRNTMGYPARYSSVIAVGAVSSNNTRASFSSVGSELEVMAPGVNILSTTPGNNYASFNGTSMAAPHVAGAAALIKAKYPSMTNVQIRERLKNTATNLGDPFFYGKGVINVESALQ

SEQ ID NO: 69471 - protein, 275 aa, Bacillus sp. LG1
AQTVPWGIPHIKADKAHAAGVTGSGVKVAILDTGIDANHADLNVKGGASFVSGEPNALQDGNGHGTHVAGTVAALNNTTGVLGVAYNADLYAVKVLSASESGTLSGIAQGIEWSISNGMNVINMSLGGSSGSTALQQACNNAYNRGIVVIAAAGNSGSSGNRNTMGYPARYSSVIAVGAVSSNNTRASFSSVGSELEVMAPGVNILSTTPGNNYASFNGTSMAAPHVAGAAALIKAKYPSMTNVQIRERLKNTATNLGDPFFYGKGVINVESALQ

SEQ ID NO: 69472 - protein, 275 aa, Bacillus sp. LG1
AQTVPWGIPHILADKAHAAGVTGSGVKVAILDTGIDANHADLNVKGGASFVSGEPNALQDGNGHGTHVAGTVAALNNTTGVLGVAYNADLYAVKVLSASGSGTLSGIAQGIEWSISNGMNVINMSLGGSSGSTALQQACNNAYNRGIVVIAAAGNSGSSGNRNTMGYPARYSSVIAVGAVSSNNTRASFSSVGSELEVMAPGVNILSTTPGNNYASFNGTSMAAPHVAGAAALIKAKYPSMTNVQIRERLKNTATNLGDPFFYGKGVINVESALQ

SEQ ID NO: 69473 - protein, 275 aa, Bacillus sp. LG1
AQTVPWGIPHIKADKAHAAGVTGSGVKVAILDTGIDANHADLNVKGGASFVSGEPNALQDGNGHGTHVAGTVAALNNTTGVLGVAYNADLYAVKVLSASGSGTLSGIAQGIEWSISNGMNVINMSLGGSSGSTALQQACNNAYNRGIVVIAAAGNSGSSGNRNTMGYPARYSSVIAVGAVSSNNTRASFSSVGSELEVMAPGVNILSTTPGNNYASFNGTSMAAPHVSGAAALIKAKYPSMTNVQIRERLKNTATNLGDPFFYGKGVINVESALQ

SEQ ID NO: 69474 - protein, 275 aa, Bacillus sp. LG1
AQTVPWGIPHIKADKAHAAGVTGSGVKVAILDTGIDANHADLNVKGGASFVSGEPNALQDGNGHGTHVAGTVAALNNTTGVLGVAYNADLYAVKVLSASGSGTLSGIAQGIEWSISYGMNVINMSLGGSSGSTALQQACNNAYNRGIVVIAAAGNSGSSGNRNTMGYPARYSSVIAVGAVSSNNTRASFSSVGSELEVMAPGVNILSTTPGNNYASFNGTSMAAPHVAGAAALIKAKYPSMTNVQIRERLKNTATNLGDPFFYGKGVINVESALQ

SEQ ID NO: 69475 - protein, 275 aa, Bacillus sp. LG1
AQTVPWGIPHIKADKAHAAGVTGSGVKVAILDTGIDANHADLNVKGGASFVSGEPNALQDGNGHGTHVAGTVAALNNTTGVLGVAYNADLYAVKVLSASGSGTLSGIAQSIEWSISNGMNVINMSLGGSSGSTALQQACNNAYNRGIVVIAAAGNSGSSGNRNTMGYPARYSSVIAVGAVSSNNTRASFSSVGSELEVMAPGVNILSTTPGNNYASFNGTSMAAPHVAGAAALIKAKYPSMTNVQIRERLKNTATNLGDPFFYGKGVINVESALQ

SEQ ID NO: 69476 - protein, 275 aa, Bacillus sp. LG1
AQTVPWGIPHIKADKAHAAGVTGSGVKVAILDTGIDANHADLNVKGGASFVSGEPNALQDGNGHGTHVAGTVAALNNTTGVLGVAYNADLYAVKVLSASGSGTLSGIAQGIEWSISNGMNVINMSLGGSSGSTALQQACNNAYNRGIVVIAAAGNSGSSGYRNTMGYPARYSSVIAVGAVSSNNTRASFSSVGSELEVMAPGVNILSTTPGNNYASFNGTSMAAPHVAGAAALIKAKYPSMTNVQIRERLKNTATNLGDPFFYGKGVINVESALQ

SEQ ID NO: 69477 - protein, 275 aa, Bacillus sp. LG1
AQTVPWGIPHIKADKAHAAGVTGSGVKVAILDTGIDANHADLNVKGGASFVSGEPNALQDGNGHGTHVAGTVAALNNTTGVLGVAYNADLYAVKVLSASGSGTLSGIAQGIEWSISNGMNVINMSLGGSSGSTALQQACNNAYNRGIVVIAAAGNSGSSGNRNTMGYPARYSSVIAVGAVSSNNTRASFSSVGSELEVMAPGVNILSTTPGNNYASFNGTSMAAPHVAGAAALIKAKYPSMTNVRIRERLKNTATNLGDPFFYGKGVINVESALQ

SEQ ID NO: 69478 - protein, 275 aa, Bacillus sp. LG1
AQTVPWGIPHIKADKAHAAGVTGSGVKVAILDTGIDANHADLNVKGGASFVSGEPNALQDGNGHGTHVAGTVAALNNTTGVLGVAYNADLYAVKVLSASGSGTLSGIAQGIEWSISNGMNVINMSLGGSSGSTALQQACNNAYNRGIVVIAAAGNSGSSGNRNTMGYPARYSSVIAVGAVSENNTRASFSSVGSELEVMAPGVNILSTTPGNNYASFNGTSMAAPHVAGAAALIKAKYPSMTNVQIRERLKNTATNLGDPFFYGKGVINVESALQ

SEQ ID NO: 69479 - protein, 275 aa, Bacillus sp. LG1
AQTVPWGIPHIKADKAHAAGVTGSGVKVAILDTGIDANHADLNVKGGASFVSGEPNALQDGNGHGTHVAGTVAALNNTTGVLGVAYNADLYAVKVLSASGSGTLSGIAQGIEWSISNGMNVINMSLGGSSGSTALQQACNNAYNRGIVVIAAAGNSGSSGNRNTMGYPARYSSVIAVGAVSSNNTRAHFSSVGSELEVMAPGVNILSTTPGNNYASFNGTSMAAPHVAGAAALIKAKYPSMTNVQIRERLKNTATNLGDPFFYGKGVINVESALQ

SEQ ID NO: 69480 - protein, 275 aa, Bacillus sp. LG1
AQTVPWGIPHIKADKAHAAGVTGSGVKVAILDTGIDANHADLNVKGGASFVSGEPNALQDGNGHGTHVAGTVAALNNTTGVLGVAYNADLYAVKVLSASGSGTLSGIAQGIEWSISNGMNVINMSLGGSSGSTALQQACNNAYNRGIVVIAAAGNSGSSGNRNTMGYPARYSSVIAVGAVSSYNTRASFSSVGSELEVMAPGVNILSTTPGNNYASFNGTSMAAPHVAGAAALIKAKYPSMTNVQIRERLKNTATNLGDPFFYGKGVINVESALQ

SEQ ID NO: 69481 - protein, 275 aa, Bacillus sp. LG1
AQTVPWGIPHIKADKAHAAGVTGSGVKVAILDTGIDANHADVNVKGGASFVSGEPNALQDGNGHGTHVAGTVAALNNTTGVLGVAYNADLYAVKVLSASGSGTLSGIAQGIEWSISNGMNVINMSLGGSSGSTALQQACNNAYNRGIVVIAAAGNSGSSGNRNTMGYPARYSSVIAVGAVSSNNTRASFSSVGSELEVMAPGVNILSTTPGNNYASFNGTSMAAPHVAGAAALIKAKYPSMTNVQIRERLKNTATNLGDPFFYGKGVINVESALQ

SEQ ID NO: 69482 - protein, 275 aa, Bacillus sp. LG1
AQTVPWGIPHIKADKAHAAGVTGSGVKVAILDTGIDANHADLNVKGGASFVSGEPNALQDGNGHGTHVAGTVAALNNTTGVLGVAYNADLYAVKVLSASGSGTLSGIAQGIEWSISNGMNVLNMSLGGSSGSTALQQACNNAYNRGIVVIAAAGNSGSSGNRNTMGYPARYSSVIAVGAVSSNNTRASFSSVGSELEVMAPGVNILSTTPGNNYASFNGTSMAAPHVAGAAALIKAKYPSMTNVQIRERLKNTATNLGDPFFYGKGVINVESALQ

SEQ ID NO: 69483 - protein, 275 aa, Bacillus sp. LG1
AQTVPWGIPHIKADKAHAAGVTGSGVKVAILDTGIDANHADLNVKGGASFVSGEPNALQDGNGHGTHVAGTVAALNNTTGVLGVAYNADLYAVKVLSASGSGTLSGIAQGIEWSISGGMNVINMSLGGSSGSTALQQACNNAYNRGIVVIAAAGNSGSSGNRNTMGYPARYSSVIAVGAVSSNNTRASFSSVGSELEVMAPGVNILSTTPGNNYASFNGTSMAAPHVAGAAALIKAKYPSMTNVQIRERLKNTATNLGDPFFYGKGVINVESALQ

SEQ ID NO: 69484 - protein, 275 aa, Bacillus sp. LG1
AQTVPWGIPHIKADKAHAAGVTGSGVKVAILDTGIDANHADLNVKGGASFVSGEPNALQDGNGHGTHVAGTVAALNNTTGVLGVAYNADLYAVKVLSASGSGTLSGIAQGIEWSISNGMNVINMSLGGSSGSTALQQACNNAYNRGIVVIAAAGNSGSSGNRNTMGYPARYSSVIAVGAVSSNNTRASFSSVGSELEVMAPGVNILSTTPGNNYASFNGTSQAAPHVAGAAALIKAKYPSMTNVQIRERLKNTATNLGDPFFYGKGVINVESALQ

SEQ ID NO: 69485 - protein, 275 aa, Bacillus sp. LG1
AQTVPWGIPHIKADKAHAAGVTGSGVKVAILDTGIDANHADLNVKGGASFVSGEPNALQDGNGHGTHVAGTVAALNNTTGVLGVAYNADLYAVKVLSASGSGTLSGIAQGIEWSISNGMNVINMSLGGSSGSTALQQACNNAYNRGIVVIAAAGNSGSSGNRNTMGYPARYSSVIAVGAVSSNNTRASFSSVGSELEVMAPGVNILSTTPGNNNASFNGTSMAAPHVAGAAALIKAKYPSMTNVQIRERLKNTATNLGDPFFYGKGVINVESALQ

SEQ ID NO: 69486 - protein, 275 aa, Bacillus sp. LG1
AQTVPWGIPHIKADKAHAAGVTGSGVKVAILDTGIDANHADLNVKGGASFVSGEPNALQDGNGHGTHVAGTVAALNNTTGVLGVAYNADLYAVKVLSASGSGTLSGIAQGIEWSISNGMNVINMSLGGSSGSTALQQACNNAQNRGIVVIAAAGNSGSSGNRNTMGYPARYSSVIAVGAVSSNNTRASFSSVGSELEVMAPGVNILSTTPGNNYASFNGTSMAAPHVAGAAALIKAKYPSMTNVQIRERLKNTATNLGDPFFYGKGVINVESALQ

SEQ ID NO: 69487 - protein, 275 aa, Bacillus sp. LG1
AQTVPWGIPHIKADKAHAAGVTGSGVKVAILDTGIDANHADLNVKGGASFVSGEPNALQDGNGHGTHVAGTVAALNNTTGVLGVAYNADLYAVKVLSASGSGTLSGIAQGIEWSISNGMNVINMSLGGSSGSTALQQACNNAYNRGIVVIAAAGNSGSSGNRNTMGYPARYSSVIAVGAVSSNNTRASFSSVGSELEVMAPGVNILSTTPGNNMASFNGTSMAAPHVAGAAALIKAKYPSMTNVQIRERLKNTATNLGDPFFYGKGVINVESALQ

SEQ ID NO: 69488 - protein, 275 aa, Bacillus sp. LG1
AQTVPWGIPHIKADKAHAAGVTGSGVKVAIEDTGIDANHADLNVKGGASFVSGEPNALQDGNGHGTHVAGTVAALNNTTGVLGVAYNADLYAVKVLSASGSGTLSGIAQGIEWSISNGMNVINMSLGGSSGSTALQQACNNAYNRGIVVIAAAGNSGSSGNRNTMGYPARYSSVIAVGAVSSNNTRASFSSVGSELEVMAPGVNILSTTPGNNYASFNGTSMAAPHVAGAAALIKAKYPSMTNVQIRERLKNTATNLGDPFFYGKGVINVESALQ

SEQ ID NO: 69489 - protein, 275 aa, Bacillus sp. LG1
AQTVPWGIPHIKADKAHAAGVTGSGVKVAILDTGIDANHADLNVKGGASFVSGEPNALQDGNGHGTHVAGTVAALNNTTGVLGVAYNADLYAVKVLSASGSGTLSGIAQGIEWSISNGMNVINMSLGGSSGSTALQQACNNAYNRGIVVIAAAGNSGSSGNRNTMGYPARYSSVIAVGAVSRNNTRASFSSVGSELEVMAPGVNILSTTPGNNYASFNGTSMAAPHVAGAAALIKAKYPSMTNVQIRERLKNTATNLGDPFFYGKGVINVESALQ

SEQ ID NO: 69490 - protein, 275 aa, Bacillus sp. LG1
AQTVPWGIPHIKADKAHAAGVTGSGVKVAILDTGIDANHADLNVKGGASFVSGEPNALQDGNGHGTHVAGTVAALNNVTGVLGVAYNADLYAVKVLSASGSGTLSGIAQGIEWSISNGMNVINMSLGGSSGSTALQQACNNAYNRGIVVIAAAGNSGSSGNRNTMGYPARYSSVIAVGAVSSNNTRASFSSVGSELEVMAPGVNILSTTPGNNYASFNGTSMAAPHVAGAAALIKAKYPSMTNVQIRERLKNTATNLGDPFFYGKGVINVESALQ

SEQ ID NO: 69491 - protein, 275 aa, Bacillus sp. LG1
AQTVPWGIPHIKADKAHAAGVTGSGVKVAILDTGIDANHADLNVKGGAVFVSGEPNALQDGNGHGTHVAGTVAALNNTTGVLGVAYNADLYAVKVLSASGSGTLSGIAQGIEWSISNGMNVINMSLGGSSGSTALQQACNNAYNRGIVVIAAAGNSGSSGNRNTMGYPARYSSVIAVGAVSSNNTRASFSSVGSELEVMAPGVNILSTTPGNNYASFNGTSMAAPHVAGAAALIKAKYPSMTNVQIRERLKNTATNLGDPFFYGKGVINVESALQ

SEQ ID NO: 69492 - protein, 275 aa, Bacillus sp. LG1
AQTVPWGIPHIKADKAHAAGVTGSGVKVAILDTGIDANHADLNVKGGASFTSGEPNALQDGNGHGTHVAGTVAALNNTTGVLGVAYNADLYAVKVLSASGSGTLSGIAQGIEWSISNGMNVINMSLGGSSGSTALQQACNNAYNRGIVVIAAAGNSGSSGNRNTMGYPARYSSVIAVGAVSSNNTRASFSSVGSELEVMAPGVNILSTTPGNNYASFNGTSMAAPHVAGAAALIKAKYPSMTNVQIRERLKNTATNLGDPFFYGKGVINVESALQ

SEQ ID NO: 69493 - protein, 275 aa, Bacillus sp.
AQTVPWGIPHIKADKAHAAGVTGSGVKVAILDTGIDANHADLNVKGGASFVSGEPNALQDGNGHGTHVAGTVAALDNTTGVLGVAYNADLYAVKVLSASGSGTLSGIAQGIEWSISNRMNVINMSLGGSSGSTALQQACNNAYNRGIVVIAAAGNSGSSGNRNTMDYPARYSSVIAVGAVSSNNTRASFSSVGSELEVMAPGVNILSTTPGNNYASFNGTSMAAPHVAGAAALIKAKYPSMTNVQIRERLKNTATRLGDPFFYGKGVINVEKALQ

SEQ ID NO: 69494 - protein, 275 aa, Bacillus sp. LG1
AQTVPWGIPHIKADKAHAAGVTGSGVKVAILDTGIDANHADLNVKGGASFVSGEPNALQDGNGHGTHVAGTVAALNNTTGVLGVAYNADLYAVKVLSASGSGTLSGIAQGIEWSISNGMNVINMSLGGSSGSTALQQACNNAYNRGIVVIAAAGNSGSSGNRNTMGYPARYSSVSAVGAVSSNNTRASFSSVGSELEVMAPGVNILSTTPGNNYASFNGTSMAAPHVAGAAALIKAKYPSMTNVQIRERLKNTATNLGDPFFYGKGVINVESALQ

SEQ ID NO: 69495 - protein, 275 aa, Bacillus sp. LG1
AQTVPWGIPHIKADKAHAAGVTGSGVKIAILDTGIDANHADLNVKGGASFVSGEPNALQDGNGHGTHVAGTVAALNNTTGVLGVAYNADLYAVKVLSASGSGTLSGIAQGIEWSISNGMNVINMSLGGSSGSTALQQACNNAYNRGIVVIAAAGNSGSSGNRNTMGYPARYSSVIAVGAVSSNNTRASFSSVGSELEVMAPGVNILSTTPGNNYASFNGTSMAAPHVAGAAALIKAKYPSMTNVQIRERLKNTATNLGDPFFYGKGVINVESALQ

SEQ ID NO: 69496 - protein, 275 aa, Bacillus sp. LG1
AQTVPWGIPHIKADKAHVAGVTGSGVKVAILDTGIDANHADLNVKGGASFVSGEPNALQDGNGHGTHVAGTVAALNNTTGVLGVAYNADLYAVKVLSASGSGTLSGIAQGIEWSISNGMNVINMSLGGSSGSTALQQACNNAYNRGIVVIAAAGNSGSSGNRNTMGYPARYSSVIAVGAVSSNNTRASFSSVGSELEVMAPGVNILSTTPGNNYASFNGTSMAAPHVAGAAALIKAKYPSMTNVQIRERLKNTATNLGDPFFYGKGVINVESALQ

SEQ ID NO: 69497 - protein, 275 aa, Bacillus sp. LG1
AQTVPWGIPHIKADKAHAAGVTGSGVKVAILDTGIDANHADLNVKGGASFVSGEPNALQDGNGHGTHVAGTVAALNNTTGVLGVAYNADLYAVKVLSASGSGTLSGIAQGIEWSISNGMNVIHMSLGGSSGSTALQQACNNAYNRGIVVIAAAGNSGSSGNRNTMGYPARYSSVIAVGAVSSNNTRASFSSVGSELEVMAPGVNILSTTPGNNYASFNGTSMAAPHVAGAAALIKAKYPSMTNVQIRERLKNTATNLGDPFFYGKGVINVESALQ

SEQ ID NO: 69498 - protein, 275 aa, Bacillus sp. LG1
AQTGPWGIPHIKADKAHAAGVTGSGVKVAILDTGIDANHADLNVKGGASFVSGEPNALQDGNGHGTHVAGTVAALNNTTGVLGVAYNADLYAVKVLSASGSGTLSGIAQGIEWSISNGMNVINMSLGGSSGSTALQQACNNAYNRGIVVIAAAGNSGSSGNRNTMGYPARYSSVIAVGAVSSNNTRASFSSVGSELEVMAPGVNILSTTPGNNYASFNGTSMAAPHVAGAAALIKAKYPSMTNVQIRERLKNTATNLGDPFFYGKGVINVESALQ

SEQ ID NO: 69499 - protein, 275 aa, Bacillus sp. LG1
AQTVPWGIPHIKADKAHAAGVTGSGVKFAILDTGIDANHADLNVKGGASFVSGEPNALQDGNGHGTHVAGTVAALNNTTGVLGVAYNADLYAVKVLSASGSGTLSGIAQGIEWSISNGMNVINMSLGGSSGSTALQQACNNAYNRGIVVIAAAGNSGSSGNRNTMGYPARYSSVIAVGAVSSNNTRASFSSVGSELEVMAPGVNILSTTPGNNYASFNGTSMAAPHVAGAAALIKAKYPSMTNVQIRERLKNTATNLGDPFFYGKGVINVESALQ

SEQ ID NO: 69500 - protein, 275 aa, Bacillus sp. LG1
AQTVPWGIPHIKADKAHAAGVTGSGVKVAILDTGIDANHADLNVKGGASFVSGEPNALQDGNGHGTHVAGTVAALNNTTGVLGVAYNADLYAVKVLSASGSGTLSGIAQGIEWSISNGMNVINMSLGGSSGSTALQQACNNAYNRGIDVIAAAGNSGSSGNRNTMGYPARYSSVIAVGAVSSNNTRASFSSVGSELEVMAPGVNILSTTPGNNYASFNGTSMAAPHVAGAAALIKAKYPSMTNVQIRERLKNTATNLGDPFFYGKGVINVESALQ

SEQ ID NO: 69501 - protein, 275 aa, Bacillus sp. LG1
AQTVPWGIPHIKADKAHAAGVTGSGVKVAILDTGIDANHADLNVKGGASFVSGEPNALQDGNGHGTHVAGTVAALNNTTGVLGVAYNADLYAVKVLSASGSGTLSGIAQGIEWSISNGMNVINMSLGGSSGSTALQQACNTAYNRGIVVIAAAGNSGSSGNRNTMGYPARYSSVIAVGAVSSNNTRASFSSVGSELEVMAPGVNILSTTPGNNYASFNGTSMAAPHVAGAAALIKAKYPSMTNVQIRERLKNTATNLGDPFFYGKGVINVESALQ

SEQ ID NO: 69502 - protein, 275 aa, Bacillus sp. LG1
AQTVPWGIPHIKADKAHAAGVTGSGVKVAILDTGIDANHADLNVKGGASFVSGEPNALQDGNGHGTHVAGTVAALNNTTGVLGVAYNADLYAVKVLSASGSGTLSGIAQGIEWSISNGMNVINMSLGGSSDSTALQQACNNAYNRGIVVIAAAGNSGSSGNRNTMGYPARYSSVIAVGAVSSNNTRASFSSVGSELEVMAPGVNILSTTPGNNYASFNGTSMAAPHVAGAAALIKAKYPSMTNVQIRERLKNTATNLGDPFFYGKGVINVESALQ

SEQ ID NO: 69503 - protein, 275 aa, Bacillus sp. LG1
AQTVPWGIPHIKADKAHAAGVTGSGVKVAILDTGIDANHADLNVKGGASFVSGEPNALQDGNGHGTHVAGTVAALNNTTGVLGVAYNADLYAVKVLSASGSGTLSGIAQGIEWSISNGMNVINMSLGGSSGSTALQQACNNAYNRGIVVIAAAGNSGSSGNRNDMGYPARYSSVIAVGAVSSNNTRASFSSVGSELEVMAPGVNILSTTPGNNYASFNGTSMAAPHVAGAAALIKAKYPSMTNVQIRERLKNTATNLGDPFFYGKGVINVESALQ

SEQ ID NO: 69504 - protein, 275 aa, Bacillus sp. LG1
AQTVPWGIPHIKADKAHAAGVTGSGVKVAILDTGIDANHADLNVKGGASFVSGEPNALQDGNGHGTHVAGTVAALNNTTGVLGVAYNADLYAVKVLSASGSGTLSGIAQGIEWSISNGMNVINMSLGGSSGSTALQQACNNAYNRGIVVIAAAGNSGSSGNRNTMGYPARYSSVIAVGAVSSNNTRASFSSVGSELEVMAPGVNILSTTIGNNYASFNGTSMAAPHVAGAAALIKAKYPSMTNVQIRERLKNTATNLGDPFFYGKGVINVESALQ

SEQ ID NO: 69505 - protein, 275 aa, Bacillus sp. LG1
AQTVPWGIPHIKADKAHAAGVTGSGVKVAILDTGIDANHADLNVKGGASFVSGEPNALQDGNGHGTHVAGTVAALNNTTGVLGVAYNADLYAVKVLSASGSGTLSGIAQGIEWSISNGMNVINMSLGGSSGSTALQQACNNAYNRGIVVIAAAGNSGSSGNRNTMGYPARYSSVIAVGAVSSNNTRASFSSVGSELEVMAPGVNILSTTPGNNYASFNGTSMAAPHVAGAAALIKAKYPSMTNVQIRERLKNTATNLGDPFFYGKGVINVESALE

SEQ ID NO: 69506 - protein, 275 aa, Bacillus sp. LG1
AQIVPWGIPHIKADKAHAAGVTGSGVKVAILDTGIDANHADLNVKGGASFVSGEPNALQDGNGHGTHVAGTVAALNNTTGVLGVAYNADLYAVKVLSASGSGTLSGIAQGIEWSISNGMNVINMSLGGSSGSTALQQACNNAYNRGIVVIAAAGNSGSSGNRNTMGYPARYSSVIAVGAVSSNNTRASFSSVGSELEVMAPGVNILSTTPGNNYASFNGTSMAAPHVAGAAALIKAKYPSMTNVQIRERLKNTATNLGDPFFYGKGVINVESALQ

SEQ ID NO: 69507 - protein, 275 aa, Bacillus sp. LG1
AQTVPWGIPHIKADKAHAAGVTGSGVKVAILDTGIDANHADLNVKGGASFVSGEPNALQDGNGHGTHVAGTVAALNNTTGVLGVAYNADLYAVKVLSASGSGTLSGIAQGIEWSISNTMNVINMSLGGSSGSTALQQACNNAYNRGIVVIAAAGNSGSSGNRNTMGYPARYSSVIAVGAVSSNNTRASFSSVGSELEVMAPGVNILSTTPGNNYASFNGTSMAAPHVAGAAALIKAKYPSMTNVQIRERLKNTATNLGDPFFYGKGVINVESALQ

SEQ ID NO: 69508 - protein, 275 aa, Bacillus sp. LG1
AQTVPWGIPHIKADKAHAAGVTGSGVKVAILDTGIDANHADLNVKGGASFVSGEPNALQDGNGHGTHVAGTVAALNNTTGVLGVAYNADLYAVKVLSASGSGTLSGIAQGIEWSISNGMNVINMSLGGSSGSTALQQACNNAYNRGIVVIAAAGNSGSSGNRNTMGYPARYSDVIAVGAVSSNNTRASFSSVGSELEVMAPGVNILSTTPGNNYASFNGTSMAAPHVAGAAALIKAKYPSMTNVQIRERLKNTATNLGDPFFYGKGVINVESALQ

SEQ ID NO: 69509 - protein, 275 aa, Bacillus sp. LG1
AQTVPWGIPHIKADKAHAAGVTGSGVKVAILDTGIDANHADLDVKGGASFVSGEPNALQDGNGHGTHVAGTVAALNNTTGVLGVAYNADLYAVKVLSASGSGTLSGIAQGIEWSISNGMNVINMSLGGSSGSTALQQACNNAYNRGIVVIAAAGNSGSSGNRNTMGYPARYSSVIAVGAVSSNNTRASFSSVGSELEVMAPGVNILSTTPGNNYASFNGTSMAAPHVAGAAALIKAKYPSMTNVQIRERLKNTATNLGDPFFYGKGVINVESALQ

SEQ ID NO: 69510 - protein, 275 aa, Bacillus sp. LG1
AQTVPWGIPHIKADKAHAAGVTGSGVKVAILDTGIDANHADLNVKGGASFVSGEPNALQDGNGHGTHVAGTVAALNNTTGVLGVAYNADLYAVKVLSASGSGTLSGIAQGIEWSISNGMNVINMSLGGSSGSTALQQACNNAYNRGIVVIAAAGNSGSSGNRNTMMYPARYSSVIAVGAVSSNNTRASFSSVGSELEVMAPGVNILSTTPGNNYASFNGTSMAAPHVAGAAALIKAKYPSMTNVQIRERLKNTATNLGDPFFYGKGVINVESALQ

SEQ ID NO: 69511 - protein, 275 aa, Bacillus sp. LG1
AQTVPWGIPHIKADKAHAAGVTGSGVKVAILDTGIDANHADLNVKGGASFVSGEPNALQDGNGHGTHVAGTVAALNNTTGVLGVAYNADLYAVKVLSASGSGTLSGIAQGIEWSISNGMNVINMSLGGSSGSTALQQACNNAYNRGIVVIAAAGNSGSSGNRNTMGYPARYSSVIAVGAVSSNNTRASFSSVGSELEVMAPGVNILSTTPGNNYASFNGTSMAAPHVAGAAALIKAKYPSMTNVQIRERLKNTAINLGDPFFYGKGVINVESALQ

SEQ ID NO: 69512 - protein, 275 aa, Bacillus sp. LG1
AQTVPWGIPHIKADKAHAAGVTGSGVKVAILDTGIDANHADLNVKGGASFVSGEPNALQDGNGHGTHVAGTVAALNNTTGVLGVAYNADLYAVKVLSASGSGTLSGIAQGIEWSISNGMNVINMSLGGSSGSTALQQACNNAYNRGIVVIAAAGNSGSSGNRNTMGYPARYSAVIAVGAVSSNNTRASFSSVGSELEVMAPGVNILSTTPGNNYASFNGTSMAAPHVAGAAALIKAKYPSMTNVQIRERLKNTATNLGDPFFYGKGVINVESALQ

SEQ ID NO: 69513 - protein, 275 aa, Bacillus sp. LG1
AQTVPWGIPHIKADKAHAAGVTGSGVKVAILDTGIDANHADLNVKGGASFVSGEPNALQDGNGHGTHVAGTVAALNNTTGVLGVAYNADLYAVKVLSASGSGTLSGIAQGIEWSISNGMNVINMSLGGSSGSTALQQACNNANNRGIVVIAAAGNSGSSGNRNTMGYPARYSSVIAVGAVSSNNTRASFSSVGSELEVMAPGVNILSTTPGNNYASFNGTSMAAPHVAGAAALIKAKYPSMTNVQIRERLKNTATNLGDPFFYGKGVINVESALQ

SEQ ID NO: 69514 - protein, 275 aa, Bacillus sp. LG1
AQTVPWGIPHIKADKAHAAGVTGSGVKVAILDTGIDANHADLNVKGGASFVSGEPNALQDGNGHGTHVAGTVAALNNTTGVLGVAYNADLYAVKVLSASGSGTLSGIAQGIEWSISNGMNVINMSLGGSSGSTALQQACNNAYNRGIVVIAAAGNSGSSGNRNTMGYPARYSSVIAVGAVSSNNTRASFSSVGSELEVMAPGVNILSTTPGNNYASFNGTSMAAPHVAGAAALIKAKYPSMTNVQIRERLKNTATNLGDPFFYGKGVITVESALQ

SEQ ID NO: 69515 - protein, 275 aa, Bacillus sp. LG1
AQTVPWGIPHIKADKAHAAGVTGSGVKVAILDTGIDANHADLNVKGGASFVSGEPNALQDGNGHGTHVAGTVAALNNTTGVLGVAYNADLYAVKVLSASGSGTLSGIAQGIEWSISNGMNVINMSLGGSSGSTALQQACNNAYNRGIVVIAAAGNSGSSGNRNTMGYPARYSSVIAVGAVSSNNTRASFSSVGSELEVMAPGVNILSTTPGNNYASFNGTSMAAPHVAGQAALIKAKYPSMTNVQIRERLKNTATNLGDPFFYGKGVINVESALQ

SEQ ID NO: 69516 - protein, 275 aa, Bacillus sp. LG1
AQTVPWGIPHIKADKAHAAGVTGSGVKVAILDTGIDANHADLNVKGGASFKSGEPNALQDGNGHGTHVAGTVAALNNTTGVLGVAYNADLYAVKVLSASGSGTLSGIAQGIEWSISNGMNVINMSLGGSSGSTALQQACNNAYNRGIVVIAAAGNSGSSGNRNTMGYPARYSSVIAVGAVSSNNTRASFSSVGSELEVMAPGVNILSTTPGNNYASFNGTSMAAPHVAGAAALIKAKYPSMTNVQIRERLKNTATNLGDPFFYGKGVINVESALQ

SEQ ID NO: 69517 - protein, 275 aa, Bacillus sp. LG1
AQTVPWGIPHIKADPAHAAGVTGSGVKVAILDTGIDANHADLNVKGGASFVSGEPNALQDGNGHGTHVAGTVAALNNTTGVLGVAYNADLYAVKVLSASGSGTLSGIAQGIEWSISNGMNVINMSLGGSSGSTALQQACNNAYNRGIVVIAAAGNSGSSGNRNTMGYPARYSSVIAVGAVSSNNTRASFSSVGSELEVMAPGVNILSTTPGNNYASFNGTSMAAPHVAGAAALIKAKYPSMTNVQIRERLKNTATNLGDPFFYGKGVINVESALQ

SEQ ID NO: 69518 - protein, 275 aa, Bacillus sp. LG1
AQTVPWGIPHIKADKAHAAGVTGSGVKVAILDTGIDANHADLNVKGGASFVSGEPNALQDGNGHGTHVAGTVAALNNTTGVLGVAYNADLYAVKVLSASGSGTLSGIAQGIEWSISNGMNVINMSLGGSSGSTALQQACNNAYNRGIVVIAAAGNSGSSGNRNTMCYPARYSSVIAVGAVSSNNTRASFSSVGSELEVMAPGVNILSTTPGNNYASFNGTSMAAPHVAGAAALIKAKYPSMTNVQIRERLKNTATNLGDPFFYGKGVINVESALQ

SEQ ID NO: 69519 - protein, 275 aa, Bacillus sp. LG1
AQTVPWGNPHIKADKAHAAGVTGSGVKVAILDTGIDANHADLNVKGGASFVSGEPNALQDGNGHGTHVAGTVAALNNTTGVLGVAYNADLYAVKVLSASGSGTLSGIAQGIEWSISNGMNVINMSLGGSSGSTALQQACNNAYNRGIVVIAAAGNSGSSGNRNTMGYPARYSSVIAVGAVSSNNTRASFSSVGSELEVMAPGVNILSTTPGNNYASFNGTSMAAPHVAGAAALIKAKYPSMTNVQIRERLKNTATNLGDPFFYGKGVINVESALQ

SEQ ID NO: 69520 - protein, 275 aa, Bacillus sp. LG1
AQTVPWGIPHIKADKAHAAGVTGSGVKVAILDTGIDANHADLNVKGGASFVSGEPNALQDGNGHGTHVAGTVAALNNTTGVLGVAYNADLYAVKVLSASGSGTLSGIAQGIEWSISNGMNVINMSLGGSSGSTALQQACNNAYNRGIVDIAAAGNSGSSGNRNTMGYPARYSSVIAVGAVSSNNTRASFSSVGSELEVMAPGVNILSTTPGNNYASFNGTSMAAPHVAGAAALIKAKYPSMTNVQIRERLKNTATNLGDPFFYGKGVINVESALQ

SEQ ID NO: 69521 - protein, 275 aa, Bacillus sp. LG1
AQTVPWGIPHIKADKAHAAGVTGSGVKVAILDTGIDANHADLNVKGGASFVSGEPNALQDGNGHGTHVAGTVAALNNTTGVLGVAYNADLYAVKVLSASGSGTLSGIAQGIEWSISNGMNVINMSLGGSSGSTALQQACNNAYNRGIVVIAAAGNSGSSGQRNTMGYPARYSSVIAVGAVSSNNTRASFSSVGSELEVMAPGVNILSTTPGNNYASFNGTSMAAPHVAGAAALIKAKYPSMTNVQIRERLKNTATNLGDPFFYGKGVINVESALQ

SEQ ID NO: 69522 - protein, 275 aa, Bacillus sp. LG1
AQTVPWGIPHIKADKAHAAGVTGSGVKVAILDTGGDANHADLNVKGGASFVSGEPNALQDGNGHGTHVAGTVAALNNTTGVLGVAYNADLYAVKVLSASGSGTLSGIAQGIEWSISNGMNVINMSLGGSSGSTALQQACNNAYNRGIVVIAAAGNSGSSGNRNTMGYPARYSSVIAVGAVSSNNTRASFSSVGSELEVMAPGVNILSTTPGNNYASFNGTSMAAPHVAGAAALIKAKYPSMTNVQIRERLKNTATNLGDPFFYGKGVINVESALQ

SEQ ID NO: 69523 - protein, 275 aa, Bacillus sp. LG1
AQTVPWGIPHIKADKAHAAGVTGSGVKVAILDTGIDANHADLNVKGGASFVSGEPNALQDGNGHGTHVAGTVAALNNTTGVLGVAYNADLYAVKVLSASGSGTLSGIAQGIEWSISNGMNVINMSLGGSSGSTALQQACNNAYNRGIVVIAAAGNSGSSGNRNTMGYPARYSSVIAVGAVSSNNTRASFSSVGSELEVMAPGVNILSTTPGNNYASFNGTSMAAPHVAGAAALIKAKYKSMTNVQIRERLKNTATNLGDPFFYGKGVINVESALQ

SEQ ID NO: 69524 - protein, 275 aa, Bacillus sp. LG1
AQTVPWGIPHIKADKAHAAGVTGSGVKVAILDTGIDANHADLNVKGGASFVSGEPNALQDANGHGTHVAGTVAALNNTTGVLGVAYNADLYAVKVLSASGSGTLSGIAQGIEWSISNGMNVINMSLGGSSGSTALQQACNNAYNRGIVVIAAAGNSGSSGNRNTMGYPARYSSVIAVGAVSSNNTRASFSSVGSELEVMAPGVNILSTTPGNNYASFNGTSMAAPHVAGAAALIKAKYPSMTNVQIRERLKNTATNLGDPFFYGKGVINVESALQ

SEQ ID NO: 69525 - protein, 275 aa, Bacillus sp. LG1
AQTVPWGIPHIKADKAHAAGVTGSGVKVAILDTGIDANHADLNVKGGASFVSGEPNALQDGNGHGTHVAGTVAALNNTTGVLGVAYNADLYAVKVLSASGSGTLSGIAQGIEWSISNGMNVINMSLGGSSGSTALQQACNNAYNRGIVVIAAAGNSGSSGNRNTMGYPARYSSVIAVGAVSSNNTRASFSSVGSELEVMAPGVNILSTTPGNNYASFNGTSMAAPHVAGAAALIKAKYPSMTNVQIREWLKNTATNLGDPFFYGKGVINVESALQ

SEQ ID NO: 69526 - protein, 275 aa, Bacillus sp. LG1
AQTVPWGIPHIKADKAHAAGVTGSGVKVAILDTGIDANHADLNVKGGASFVSGEPNALQDGNPHGTHVAGTVAALNNTTGVLGVAYNADLYAVKVLSASGSGTLSGIAQGIEWSISNGMNVINMSLGGSSGSTALQQACNNAYNRGIVVIAAAGNSGSSGNRNTMGYPARYSSVIAVGAVSSNNTRASFSSVGSELEVMAPGVNILSTTPGNNYASFNGTSMAAPHVAGAAALIKAKYPSMTNVQIRERLKNTATNLGDPFFYGKGVINVESALQ

SEQ ID NO: 69527 - protein, 275 aa, Bacillus sp. LG1
AQTVPWGIPHIKADKAHAAGVTGSGVKVAILDTGIDANHADLNVKGGASFVSGEPNALQDGNGHGTHVAGTVAALNNTTGVLGVAYNADLYAVKTLSASGSGTLSGIAQGIEWSISNGMNVINMSLGGSSGSTALQQACNNAYNRGIVVIAAAGNSGSSGNRNTMGYPARYSSVIAVGAVSSNNTRASFSSVGSELEVMAPGVNILSTTPGNNYASFNGTSMAAPHVAGAAALIKAKYPSMTNVQIRERLKNTATNLGDPFFYGKGVINVESALQ

SEQ ID NO: 69528 - protein, 275 aa, Bacillus sp. LG1
AQTVPWGIPHIKADKAHAAGVTGSGVKVAILDTGIDANHADLNIKGGASFVSGEPNALQDGNGHGTHVAGTVAALNNTTGVLGVAYNADLYAVKVLSASGSGTLSGIAQGIEWSISNGMNVINMSLGGSSGSTALQQACNNAYNRGIVVIAAAGNSGSSGNRNTMGYPARYSSVIAVGAVSSNNTRASFSSVGSELEVMAPGVNILSTTPGNNYASFNGTSMAAPHVAGAAALIKAKYPSMTNVQIRERLKNTATNLGDPFFYGKGVINVESALQ

SEQ ID NO: 69529 - protein, 275 aa, Bacillus sp. LG1
AQTVPWGIPHIKADKAHAAGVTGSGVKVAILDTGIDANHADLNVKGGASFVSGEPNALQDGNGHGTHVAGTVAALNNTTGVLGVAYNADLYAVKVLSASGSGTLSGIAQGIEWSISNGMNVINMSLGGSWGSTALQQACNNAYNRGIVVIAAAGNSGSSGNRNTMGYPARYSSVIAVGAVSSNNTRASFSSVGSELEVMAPGVNILSTTPGNNYASFNGTSMAAPHVAGAAALIKAKYPSMTNVQIRERLKNTATNLGDPFFYGKGVINVESALQ

SEQ ID NO: 69530 - protein, 275 aa, Bacillus sp. LG1
AQTVPWGIPHIKADKAHAAGVTGSGVKVAILDTGIDANHADLNVKGGASFVSGEPNALQDTNGHGTHVAGTVAALNNTTGVLGVAYNADLYAVKVLSASGSGTLSGIAQGIEWSISNGMNVINMSLGGSSGSTALQQACNNAYNRGIVVIAAAGNSGSSGNRNTMGYPARYSSVIAVGAVSSNNTRASFSSVGSELEVMAPGVNILSTTPGNNYASFNGTSMAAPHVAGAAALIKAKYPSMTNVQIRERLKNTATNLGDPFFYGKGVINVESALQ

SEQ ID NO: 69531 - protein, 275 aa, Bacillus sp. LG1
AQTVPWGIPHIKADKAHAAGVTGSGVKVAILDTGIDANHADLNVKGGASFVSGEPNALQDGNGHGTHVAGTVAALNNTTGVLGVAYNADLYAVKVLSASGSGTLSGIAQGIEWSISNGMNVINMSLGGSSGATALQQACNNAYNRGIVVIAAAGNSGSSGNRNTMGYPARYSSVIAVGAVSSNNTRASFSSVGSELEVMAPGVNILSTTPGNNYASFNGTSMAAPHVAGAAALIKAKYPSMTNVQIRERLKNTATNLGDPFFYGKGVINVESALQ

SEQ ID NO: 69532 - protein, 275 aa, Bacillus sp. LG1
AQTVPWGIPHIKADKAHAAGVTGSGSKVAILDTGIDANHADLNVKGGASFVSGEPNALQDGNGHGTHVAGTVAALNNTTGVLGVAYNADLYAVKVLSASGSGTLSGIAQGIEWSISNGMNVINMSLGGSSGSTALQQACNNAYNRGIVVIAAAGNSGSSGNRNTMGYPARYSSVIAVGAVSSNNTRASFSSVGSELEVMAPGVNILSTTPGNNYASFNGTSMAAPHVAGAAALIKAKYPSMTNVQIRERLKNTATNLGDPFFYGKGVINVESALQ

SEQ ID NO: 69533 - protein, 275 aa, Bacillus sp. LG1
AQTVPWGIPHIKADKAHAAGVTGSGVKVAILDTGIDANHADLNVKGGASFVSGEPNALQDGNGHGTHVAGTVAALNNTTGVLGVAYNADLYAVKVLSASGSGTLSGIAQGIEYSISNGMNVINMSLGGSSGSTALQQACNNAYNRGIVVIAAAGNSGSSGNRNTMGYPARYSSVIAVGAVSSNNTRASFSSVGSELEVMAPGVNILSTTPGNNYASFNGTSMAAPHVAGAAALIKAKYPSMTNVQIRERLKNTATNLGDPFFYGKGVINVESALQ

SEQ ID NO: 69534 - protein, 275 aa, Bacillus amyloliquefaciens
AQSVPYGVSQIKAPALHSQGYTGSNVKVAVIDSGIDSSHPDLKVAGGASMVPSETNPFQDNNGHGTHVAGTVAALNNSIGVLGVAPSASLYAVKVLGADGSGQYSWIINGIEWAIANNMDVINMSLGGPSGSAALKAAVDKAVASGVVVVAAAGNEGTSGSSSTVGYPGKYPSVIAVGAVDSSNQRASFSSVGPELDVMAPGVSILSTWPGNKYAALNGTSMASPHVAGAAALILSKHPNWTNTQVRSSLENTTTKLGDSFYYGKGLINVQAAAQ

SEQ ID NO: 69535 - protein, 275 aa, Bacillus sp. LG1
AQTVPWGIPHIKADKAHAAGVTGSGVKVAILDTGIDANHADLNVKGGASFVSGEPNALQDGNGHGTHVAGTVAALNNGTGVLGVAYNADLYAVKVLSASGSGTLSGIAQGIEWSISNGMNVINMSLGGSSGSTALQQACNNAYNRGIVVIAAAGNSGSSGNRNTMGYPARYSSVIAVGAVSSNNTRASFSSVGSELEVMAPGVNILSTTPGNNYASFNGTSMAAPHVAGAAALIKAKYPSMTNVQIRERLKNTATNLGDPFFYGKGVINVESALQ

SEQ ID NO: 69536 - protein, 275 aa, Bacillus sp. LG1
AQTVPWGIPHIKADKAHAAGVTGSGVKVAILDTGIDANHADLNVKGGASFVSGEPNALQDGNGHGTHVAGTVAALNNTTGVLGVAYNADLYAVKVLSASGSGTLSGIAQGIEWSISNGMNVINMSLGGSSGSTALQQACNNAYNRGIVVIAAAGNSGSSGNRNTMGYPARYSSVIAVGAVSSNNTRASFSSVGSELEVMAPGVNILSTTPGNNYASFNGTSMAAPHVAGAAALIKAKYPSMTNVQIRERLKNTAQNLGDPFFYGKGVINVESALQ

SEQ ID NO: 69537 - protein, 275 aa, Bacillus sp. LG1
AQTVPWGIPHIKADKAHAAGVTGSGVKVAILDTGIDANHADLNVKGGASFVSGEPNALQDGNGHGTHVAGTVAALNNTTGVLGVAYNADPYAVKVLSASGSGTLSGIAQGIEWSISNGMNVINMSLGGSSGSTALQQACNNAYNRGIVVIAAAGNSGSSGNRNTMGYPARYSSVIAVGAVSSNNTRASFSSVGSELEVMAPGVNILSTTPGNNYASFNGTSMAAPHVAGAAALIKAKYPSMTNVQIRERLKNTATNLGDPFFYGKGVINVESALQ

SEQ ID NO: 69538 - protein, 275 aa, Bacillus sp. LG1
AQTVPWGIPHIKADKAHAAGVTGSGVKVAILDTGIDANHADLNVKGGASFVSGEPNALQDGNGHGTHVAGTVAALNNTTGVLGVAYNADLYAVKVRSASGSGTLSGIAQGIEWSISNGMNVINMSLGGSSGSTALQQACNNAYNRGIVVIAAAGNSGSSGNRNTMGYPARYSSVIAVGAVSSNNTRASFSSVGSELEVMAPGVNILSTTPGNNYASFNGTSMAAPHVAGAAALIKAKYPSMTNVQIRERLKNTATNLGDPFFYGKGVINVESALQ

SEQ ID NO: 69539 - protein, 275 aa, Bacillus sp. LG1
AQHVPWGIPHIKADKAHAAGVTGSGVKVAILDTGIDANHADLNVKGGASFVSGEPNALQDGNGHGTHVAGTVAALNNTTGVLGVAYNADLYAVKVLSASGSGTLSGIAQGIEWSISNGMNVINMSLGGSSGSTALQQACNNAYNRGIVVIAAAGNSGSSGNRNTMGYPARYSSVIAVGAVSSNNTRASFSSVGSELEVMAPGVNILSTTPGNNYASFNGTSMAAPHVAGAAALIKAKYPSMTNVQIRERLKNTATNLGDPFFYGKGVINVESALQ

SEQ ID NO: 69540 - protein, 275 aa, Bacillus sp. LG1
AQTVPWGIPHIKADKAHAAGVTGSGVKVAILDTGIDANHADLNVKGGASFVSGEPNALQDGNGHGTHVAGTVAALNNTTGVLGVAYNADLYAVKVLSASGSGTLSGIAQGIEWSISNGMNVINMSLGGSSGSTALQQACNNAYNRGIVVIAAAGNSGSSGNRNTMGYPARYSSVIAVGAVSSNNTRASFSSVGSELEVMAPGVNILSTTPGNNYASFNGTSMAAPHVAGAAALIKAWYPSMTNVQIRERLKNTATNLGDPFFYGKGVINVESALQ

SEQ ID NO: 69541 - protein, 275 aa, Bacillus sp. LG1
AQTVPWGIPHIKADKAHAAGVTGSGVKVAILDTGIDANHADLNVKGGASFVSGEPNALQDGNGHGTHVAGTVAALNNTTYVLGVAYNADLYAVKVLSASGSGTLSGIAQGIEWSISNGMNVINMSLGGSSGSTALQQACNNAYNRGIVVIAAAGNSGSSGNRNTMGYPARYSSVIAVGAVSSNNTRASFSSVGSELEVMAPGVNILSTTPGNNYASFNGTSMAAPHVAGAAALIKAKYPSMTNVQIRERLKNTATNLGDPFFYGKGVINVESALQ

SEQ ID NO: 69542 - protein, 275 aa, Bacillus sp. LG1
AQTVPWGIPHIKADKAHAAGVTGSGVKVAILDTGIDANHADLNVKGGNSFVSGEPNALQDGNGHGTHVAGTVAALNNTTGVLGVAYNADLYAVKVLSASGSGTLSGIAQGIEWSISNGMNVINMSLGGSSGSTALQQACNNAYNRGIVVIAAAGNSGSSGNRNTMGYPARYSSVIAVGAVSSNNTRASFSSVGSELEVMAPGVNILSTTPGNNYASFNGTSMAAPHVAGAAALIKAKYPSMTNVQIRERLKNTATNLGDPFFYGKGVINVESALQ

SEQ ID NO: 69543 - protein, 275 aa, Bacillus sp. LG1
AQTVPWGIPHIKADKAHAAGVTGSGVKVAILDTGIDANHADLNVKGGASFVSGEPNALQDGNGHGTHVAGTVAALNNTTGVLGVAYNADLYAVKVLSASGSGTLSGIAQGIEWSISNGMNVINMSLGGSSGSTALQQACNNAYNRGIVVIAAAGNSGSSGNRNTMGYPARYSSVIAVGAVSSNNTRDSFSSVGSELEVMAPGVNILSTTPGNNYASFNGTSMAAPHVAGAAALIKAKYPSMTNVQIRERLKNTATNLGDPFFYGKGVINVESALQ

SEQ ID NO: 69544 - protein, 275 aa, Bacillus sp. LG1
AQTVPWGIPHIKADKAHAAGVTGSGVKVAILDTGIDANHADLNVKGGASFVSGEPNALQDGNGHGTHVAGTVAALNNTTGVLGVAYNADLYAVKVLSASGSGTLSGIAQGIEWSISNGMNVINMSLGGSSGSTALQQACNNAYNRGIVSIAAAGNSGSSGNRNTMGYPARYSSVIAVGAVSSNNTRASFSSVGSELEVMAPGVNILSTTPGNNYASFNGTSMAAPHVAGAAALIKAKYPSMTNVQIRERLKNTATNLGDPFFYGKGVINVESALQ

SEQ ID NO: 69545 - protein, 275 aa, Bacillus sp. LG1
AQTVPWGIPHIKADKAHAAGVTGSGVKVAILDTGIDANHADLNVKGGASFVSGEPNALQDGNEHGTHVAGTVAALNNTTGVLGVAYNADLYAVKVLSASGSGTLSGIAQGIEWSISNGMNVINMSLGGSSGSTALQQACNNAYNRGIVVIAAAGNSGSSGNRNTMGYPARYSSVIAVGAVSSNNTRASFSSVGSELEVMAPGVNILSTTPGNNYASFNGTSMAAPHVAGAAALIKAKYPSMTNVQIRERLKNTATNLGDPFFYGKGVINVESALQ

SEQ ID NO: 69546 - protein, 275 aa, Bacillus sp. LG1
AQTVPWGIPHIKADKAHAAGVTGSGVKVAILDTGTDANHADLNVKGGASFVSGEPNALQDGNGHGTHVAGTVAALNNTTGVLGVAYNADLYAVKVLSASGSGTLSGIAQGIEWSISNGMNVINMSLGGSSGSTALQQACNNAYNRGIVVIAAAGNSGSSGNRNTMGYPARYSSVIAVGAVSSNNTRASFSSVGSELEVMAPGVNILSTTPGNNYASFNGTSMAAPHVAGAAALIKAKYPSMTNVQIRERLKNTATNLGDPFFYGKGVINVESALQ

SEQ ID NO: 69547 - protein, 275 aa, Bacillus sp. LG1
AQTVPWGTPHIKADKAHAAGVTGSGVKVAILDTGIDANHADLNVKGGASFVSGEPNALQDGNGHGTHVAGTVAALNNTTGVLGVAYNADLYAVKVLSASGSGTLSGIAQGIEWSISNGMNVINMSLGGSSGSTALQQACNNAYNRGIVVIAAAGNSGSSGNRNTMGYPARYSSVIAVGAVSSNNTRASFSSVGSELEVMAPGVNILSTTPGNNYASFNGTSMAAPHVAGAAALIKAKYPSMTNVQIRERLKNTATNLGDPFFYGKGVINVESALQ

SEQ ID NO: 69548 - protein, 275 aa, Bacillus sp. LG1
AQTVPWGIPHIKADKAHAAGVTGSGVKVAILDTGIDANHADLNVKGGASFVSGEPNALQDGNGHGTHVAGTVAALNNTTGVLGVAYNADLYAVKVLSASGSGTLSGIAQGIEWSISNGMNVINMSLGGSSGSTALQQACNNAYNRGIVVIAAAGNSGSSGNRNTMGYPARYSSVIAVGAVSMNNTRASFSSVGSELEVMAPGVNILSTTPGNNYASFNGTSMAAPHVAGAAALIKAKYPSMTNVQIRERLKNTATNLGDPFFYGKGVINVESALQ

SEQ ID NO: 69549 - protein, 275 aa, Bacillus sp. LG1
AQTVPWGIPHIKADKAHAAGVTGSGVKVAILDTGIDANHADLNVKGGASFVSGEPNALQDGNGHGTHVAGTVAALNNTTGVLGVAYNADLYAVKVLSASGSGTLSGIAQGIEWSISNGMNVINMSLGGSSGSTALQQACNNAYNRGIVVIAAAGNSGSSGNRNTMGYPARYSSVIAVGAVSSNNTRASFSSVGSELEVMAPGVNILSTTPGNNYASFNGTSMAAPHVAGAAALIKAKYPSMTNVSIRERLKNTATNLGDPFFYGKGVINVESALQ

SEQ ID NO: 69550 - protein, 275 aa, Bacillus sp. LG1
AQTVPWGIPHIKADKAHAAGVTGSGVKVAILDTGIDANHADLNVKGGASFVSGEPNALQDGNGHGTHVAGTVAALNNTTGVLGVAYNADLYAVKVLSASGSGTLSVIAQGIEWSISNGMNVINMSLGGSSGSTALQQACNNAYNRGIVVIAAAGNSGSSGNRNTMGYPARYSSVIAVGAVSSNNTRASFSSVGSELEVMAPGVNILSTTPGNNYASFNGTSMAAPHVAGAAALIKAKYPSMTNVQIRERLKNTATNLGDPFFYGKGVINVESALQ

SEQ ID NO: 69551 - protein, 275 aa, Bacillus sp. LG1
AQTVPWGIPHIKADKAHAAGVTGSGVKVAILDTGIDANHADLNVKGGASFVSGEPNALQDGNGHGTHVAGTVAALNNTTGVLGVAYNADLYAVKVLSASGSGTLSGIAQGIEWSISNGMNVINMSLGGSSGSTALQQACNNAYNRGIVVIAAAGNSGSSGNRNTMGYPARYSSVIAVGAVSHNNTRASFSSVGSELEVMAPGVNILSTTPGNNYASFNGTSMAAPHVAGAAALIKAKYPSMTNVQIRERLKNTATNLGDPFFYGKGVINVESALQ

SEQ ID NO: 69552 - protein, 275 aa, Bacillus sp. LG1
AQTVPWGIPHIKADKAHAAGVTGSGVKVAILDTGIDANHADLNVKGGASFVSGEPNALQDGNGHGTHVAGTVAALNNTTGVLGVAYNADLYAVKVLSASGSGTLSGIAQGIEWSISNGMNVINMSLGGSSGSTALQQACNNAYNRGIVVIAAAGNSGSSGNRNTMGYPARYSSVIAVGAVSSNNTRASFSSVGSELEVMAPGVNILSTTPGNNYASFNGTSMAAPHVAGAAALIKAKYPSMTNVQIRERLKNTATNLGDPFFYGVGVINVESALQ

SEQ ID NO: 69553 - protein, 275 aa, Bacillus amyloliquefaciens
AQSVPYGVSQIKAPALHSQGYTGSNVKVAVIDSGIDSSHPDLKVAGGASMVPSETNPFQDNNSHGTHVAGTVAALNNSIGVLGVAPSASLYAVKVLNRSGSGQYSWIINGIEWAIANNMDVINMSLGGPSGSAALKAAVDKAVASGVVVVAAAGNEGTSGSSSTVGYPGKYPSVIAVGAVDSSNQRASFSSVGPELDVMAPGVSIQSTLPGNKYGALNGTSMASPHVAGAAALILSKHPNWTNTQVRSSLENTTTKLGDSFYYGKGLINVQAAAQ

SEQ ID NO: 69554 - protein, 275 aa, Bacillus sp. LG1
AQTVPWGIPHIKADKAHAAGVTGSGVKVAILDTGIDANHADLNVKGGASFVSGEPNALQDGNGHGTHVAGTVAALNNTTGVLGVAYNADLYAVKVLSASGSGTLSGIAQGIEWSISNGMNVINMSLGGSSGSVALQQACNNAYNRGIVVIAAAGNSGSSGNRNTMGYPARYSSVIAVGAVSSNNTRASFSSVGSELEVMAPGVNILSTTPGNNYASFNGTSMAAPHVAGAAALIKAKYPSMTNVQIRERLKNTATNLGDPFFYGKGVINVESALQ

SEQ ID NO: 69555 - protein, 275 aa, Bacillus sp. LG1
AQTVPWGIPHIKADKAHAAGVTGSGVKVAILDTGIDANHADLNVKGGASFVSGEPNALQDGNGHGTHVAGTVKALNNTTGVLGVAYNADLYAVKVLSASGSGTLSGIAQGIEWSISNGMNVINMSLGGSSGSTALQQACNNAYNRGIVVIAAAGNSGSSGNRNTMGYPARYSSVIAVGAVSSNNTRASFSSVGSELEVMAPGVNILSTTPGNNYASFNGTSMAAPHVAGAAALIKAKYPSMTNVQIRERLKNTATNLGDPFFYGKGVINVESALQ

SEQ ID NO: 69556 - protein, 275 aa, Bacillus sp. LG1
AQTVPWGIPHIKADKAHAAGVTGSGVKVAILDTGIDANHADLNVKGGASFVSGEPNALQDGNGHGTQVAGTVAALNNTTGVLGVAYNADLYAVKVLSASGSGTLSGIAQGIEWSISNGMNVINMSLGGSSGSTALQQACNNAYNRGIVVIAAAGNSGSSGNRNTMGYPARYSSVIAVGAVSSNNTRASFSSVGSELEVMAPGVNILSTTPGNNYASFNGTSMAAPHVAGAAALIKAKYPSMTNVQIRERLKNTATNLGDPFFYGKGVINVESALQ

SEQ ID NO: 69557 - protein, 275 aa, Bacillus sp. LG1
AQTVPWGIPHIKADKAHAAGVTGSGVKVAILDTGIDANHADLNVKGGASFVSGEPNALQDGNGHGTHVAGTVAALNNTTGVLGVAYNADLYAVKVLSASGSGTLSGIAQGIEWSISNGMNVINMSLGGSSGSTALQQACNNAYNRGIVVIAAAGNSGSSGNRNTMGYPARYSSVIAVGAVSSNNTRASFSSVGSELEVMAPGVNILSTTPGNNYASFNGTSMAAPHVAGAGALIKAKYPSMTNVQIRERLKNTATNLGDPFFYGKGVINVESALQ

SEQ ID NO: 69558 - protein, 275 aa, Bacillus sp. LG1
AQTVPWGIPHIKADKAHAAGVTGSGVKVAILDTGIDANHADLNVKGGASFVSGEPNALQDGNGHGTHVAGTVAALNNTTGVLGVAYNADLYAVKVLSASGSGTLSGIAQGIEWSISNGMNVINMSLGGSSGSTALQQACNNAYNRGIVVIAAAGNSGSSGNRNTMGYPARYSSVIAVGAVSSNNTRASFSSVGSELEVMAPGVNILSTTPGNNYASFNGTSMAAPHVAGAAALIKAKYPSMTNVQIRERLKNTAMNLGDPFFYGKGVINVESALQ

SEQ ID NO: 69559 - protein, 275 aa, Bacillus sp. LG1
AQTVPWGIPHIKADKAHAAGVTGSGVKVAILDTGIDANHADLNVKGGASFVSGEPNALQDGNGHGTHVAGTVAALNNTTGVLGVAYNADLYAVKVLSASGSGTLSGIAQGIEWSISNGMNVINMSLGGSSGSTALQQACNNAYNRGIVVIAAAGNSGSSGNRNTMGYPARYSSVIAVGAVSSNNTRASFSSVGSELEVMAPGVNILSTTPGNNYASFNGTSMAAPHVAGAAALIKAKYPSMTNVTIRERLKNTATNLGDPFFYGKGVINVESALQ

SEQ ID NO: 69560 - protein, 275 aa, Bacillus sp. LG1
AQTVPWGIPHIKADKAHAAGVTGSGVKVAILDTGIDANHADLNVKGGASFVSGEPNALQDGNGHGTHVAGTVAALNNTTGVLGVAYNADLYAVKVLSASGSGTLSGIAQGIEWSISNGMNVINMSLGGSSGSTALQQACNNAYNRGIVVIAAAGNSGSSGNRNTMGYPARYSSVIAVGAVSSNNTRASFSSVGSELEVMAPGVNILSTTPGNNYASFNGTSMAAPHVAGAAALIKAKYPSMTNVQIRERLKNTATNHGDPFFYGKGVINVESALQ

SEQ ID NO: 69561 - protein, 275 aa, Bacillus sp. LG1
AQTVPWGIPHIKADKAHAAGVTGSGVKVTILDTGIDANHADLNVKGGASFVSGEPNALQDGNGHGTHVAGTVAALNNTTGVLGVAYNADLYAVKVLSASGSGTLSGIAQGIEWSISNGMNVINMSLGGSSGSTALQQACNNAYNRGIVVIAAAGNSGSSGNRNTMGYPARYSSVIAVGAVSSNNTRASFSSVGSELEVMAPGVNILSTTPGNNYASFNGTSMAAPHVAGAAALIKAKYPSMTNVQIRERLKNTATNLGDPFFYGKGVINVESALQ

SEQ ID NO: 69562 - protein, 275 aa, Bacillus sp. LG1
AQTVPWGIPHIKADKAHAAGVTGSGVKVAILDTGIDANHADLNVKGGASFVSGEPNALQDGNGHGTHVAGTVAALNNTTGVLGVAYNADLYAVKVLSASASGTLSGIAQGIEWSISNGMNVINMSLGGSSGSTALQQACNNAYNRGIVVIAAAGNSGSSGNRNTMGYPARYSSVIAVGAVSSNNTRASFSSVGSELEVMAPGVNILSTTPGNNYASFNGTSMAAPHVAGAAALIKAKYPSMTNVQIRERLKNTATNLGDPFFYGKGVINVESALQ

SEQ ID NO: 69563 - protein, 275 aa, Bacillus sp. LG1
AQTVPWGIPHIKADKAHAAGVTGSGVKVAILDTGIDANHADLNVKGGASFVSGEPNALQDGNGHGTHVAGTVAALNNTTGVLGVAYNADLYAVKVLSASGSGTLSGIAQGIEWSISNGMNFINMSLGGSSGSTALQQACNNAYNRGIVVIAAAGNSGSSGNRNTMGYPARYSSVIAVGAVSSNNTRASFSSVGSELEVMAPGVNILSTTPGNNYASFNGTSMAAPHVAGAAALIKAKYPSMTNVQIRERLKNTATNLGDPFFYGKGVINVESALQ

SEQ ID NO: 69564 - protein, 275 aa, Bacillus sp. LG1
AQTVPWGIPHIKADKAHAAGVTGSGVKVAILDTGIDANHADLNVKGGASFVSGEPNALQDGNGHGTHVAGTVAALNTTTGVLGVAYNADLYAVKVLSASGSGTLSGIAQGIEWSISNGMNVINMSLGGSSGSTALQQACNNAYNRGIVVIAAAGNSGSSGNRNTMGYPARYSSVIAVGAVSSNNTRASFSSVGSELEVMAPGVNILSTTPGNNYASFNGTSMAAPHVAGAAALIKAKYPSMTNVQIRERLKNTATNLGDPFFYGKGVINVESALQ

SEQ ID NO: 69565 - protein, 275 aa, Bacillus sp. LG1
AQEVPWGIPHIKADKAHAAGVTGSGVKVAILDTGIDANHADLNVKGGASFVSGEPNALQDGNGHGTHVAGTVAALNNTTGVLGVAYNADLYAVKVLSASGSGTLSGIAQGIEWSISNGMNVINMSLGGSSGSTALQQACNNAYNRGIVVIAAAGNSGSSGNRNTMGYPARYSSVIAVGAVSSNNTRASFSSVGSELEVMAPGVNILSTTPGNNYASFNGTSMAAPHVAGAAALIKAKYPSMTNVQIRERLKNTATNLGDPFFYGKGVINVESALQ

SEQ ID NO: 69566 - protein, 275 aa, Bacillus sp. LG1
AYTVPWGIPHIKADKAHAAGVTGSGVKVAILDTGIDANHADLNVKGGASFVSGEPNALQDGNGHGTHVAGTVAALNNTTGVLGVAYNADLYAVKVLSASGSGTLSGIAQGIEWSISNGMNVINMSLGGSSGSTALQQACNNAYNRGIVVIAAAGNSGSSGNRNTMGYPARYSSVIAVGAVSSNNTRASFSSVGSELEVMAPGVNILSTTPGNNYASFNGTSMAAPHVAGAAALIKAKYPSMTNVQIRERLKNTATNLGDPFFYGKGVINVESALQ

SEQ ID NO: 69567 - protein, 275 aa, Bacillus sp. LG1
AQTVPWGIPHIKADKAHAAGVTGSGVKVAILDTGIDANHADLNVKGGASFVSGEPNALQDGNGHGTHVAGTVAALNNDTGVLGVAYNADLYAVKVLSASGSGTLSGIAQGIEWSISNGMNVINMSLGGSSGSTALQQACNNAYNRGIVVIAAAGNSGSSGNRNTMGYPARYSSVIAVGAVSSNNTRASFSSVGSELEVMAPGVNILSTTPGNNYASFNGTSMAAPHVAGAAALIKAKYPSMTNVQIRERLKNTATNLGDPFFYGKGVINVESALQ

SEQ ID NO: 69568 - protein, 275 aa, Bacillus sp. LG1
AQTVPWGIPHIKADKAHAAGVTGSGVKVAILDTGIDANHADLNVKGGASFVSGEPNALQDGNGHGTHVAGTVAALNNSTGVLGVAYNADLYAVKVLSASGSGTLSGIAQGIEWSISNGMNVINMSLGGSSGSTALQQACNNAYNRGIVVIAAAGNSGSSGNRNTMGYPARYSSVIAVGAVSSNNTRASFSSVGSELEVMAPGVNILSTTPGNNYASFNGTSMAAPHVAGAAALIKAKYPSMTNVQIRERLKNTATNLGDPFFYGKGVINVESALQ

SEQ ID NO: 69569 - protein, 275 aa, Bacillus sp. LG1
AQTVPWGIPHIKAEKAHAAGVTGSGVKVAILDTGIDANHADLNVKGGASFVSGEPNALQDGNGHGTHVAGTVAALNNTTGVLGVAYNADLYAVKVLSASGSGTLSGIAQGIEWSISNGMNVINMSLGGSSGSTALQQACNNAYNRGIVVIAAAGNSGSSGNRNTMGYPARYSSVIAVGAVSSNNTRASFSSVGSELEVMAPGVNILSTTPGNNYASFNGTSMAAPHVAGAAALIKAKYPSMTNVQIRERLKNTATNLGDPFFYGKGVINVESALQ

SEQ ID NO: 69570 - protein, 275 aa, Bacillus sp. LG1
AQTVPWGIPHIKADKAHAAGVTGSGVKVAILDTGIDANHADLNVKGGASFVSGEPNALQDGNGHGTHVAGTVAALNNTTGVLGVAYNADLYAVKVLSASGSGTLSGIAQGIEWSISNGMNVINMSLGGSSGSTALQQACNNAYNRGIVVIAAAGNSGSSGNRNTMGYPARYSSVIAVGAVSSNNTRASFSSVGSELEVMAPGVNILSTTPGNNYASFNGTSMAAPHVAGAAALMKAKYPSMTNVQIRERLKNTATNLGDPFFYGKGVINVESALQ

SEQ ID NO: 69571 - protein, 275 aa, Bacillus sp. LG1
AQTVPWGIPHIKADKAHAAGVTGSGVKVAILDTGIDANHADLNVKGGASFVSGEPNALQDGNGHGTHVAGTVAALNNTTGVLGVAYNADLYAVKVLSASGSGTLSGIAQGIEWSISNGMNVIIMSLGGSSGSTALQQACNNAYNRGIVVIAAAGNSGSSGNRNTMGYPARYSSVIAVGAVSSNNTRASFSSVGSELEVMAPGVNILSTTPGNNYASFNGTSMAAPHVAGAAALIKAKYPSMTNVQIRERLKNTATNLGDPFFYGKGVINVESALQ

SEQ ID NO: 69572 - protein, 275 aa, Bacillus sp. LG1
AQTVPWGIPHIKADKAHAAGVTGSGVKVAILDTGIDANHADLNVKGGASFVSGEPNALQDGNGHGTHVAGTVAALNNTTGVLGVAYNADLYAVKVLSASGSGTLSGIAQGIEWSISNGMNVINMSLGGSSGSTALQQACNNAYNRGIVVIAAGGNSGSSGNRNTMGYPARYSSVIAVGAVSSNNTRASFSSVGSELEVMAPGVNILSTTPGNNYASFNGTSMAAPHVAGAAALIKAKYPSMTNVQIRERLKNTATNLGDPFFYGKGVINVESALQ

SEQ ID NO: 69573 - protein, 275 aa, Bacillus sp. LG1
AQTVPWGIPHIKADKAHAAGVTGSGVKVAILDTGIDANHADLNVKGGASFVSGEPNALQDGNGHGTHVAGTVAALNNTTGVLGVAYNADLYAVKVLSASGSGTLSNIAQGIEWSISNGMNVINMSLGGSSGSTALQQACNNAYNRGIVVIAAAGNSGSSGNRNTMGYPARYSSVIAVGAVSSNNTRASFSSVGSELEVMAPGVNILSTTPGNNYASFNGTSMAAPHVAGAAALIKAKYPSMTNVQIRERLKNTATNLGDPFFYGKGVINVESALQ

SEQ ID NO: 69574 - protein, 275 aa, Bacillus sp. LG1
AQTVPWGIPHIKADKAHAAGVTGSGVKVAILDTGIDANHADLNVKGGASFVSGEPNALQDGNGHGTHVAGTVAALNNTTGVLGVAYNADLYAVKVLSASGSGTLSGIAQGIEWSISNGMNVINMSLGGSSGSTALQQACNNAYNRGIVVIAAAGNSGSSGNRNTMGYPARYSSVIAVGAVSSNNTRASFSSVGSELEVMAPGVNILSTTPGNNYASFNGTSMAAPHVAGAAALIKAKYPSMTNVQIRERLKNTAANLGDPFFYGKGVINVESALQ

SEQ ID NO: 69575 - protein, 275 aa, Bacillus sp. LG1
AQTVPWGIPHIKADKAHAAGVTGSGVKVAILDTGIDANHADLNVKGGASFVSGEPNALQDGNGHGTHVAGTVAALNNTTGVLGVAYNADLYAVKVLSASGSGTLSGIAQGIEWSISNGMNVINMSLGGSSGSTALQQACNNAYNRGIVVIAAAGNSGSSGNRNTMGYPARYSSVIAVGAVSSNNTRASFSSVGSELEVMAPGVNILSTTPGNNYASFNGTSMAAPHVAGAAALTKAKYPSMTNVQIRERLKNTATNLGDPFFYGKGVINVESALQ

SEQ ID NO: 69576 - protein, 275 aa, Bacillus sp.
AQTVPWGIPHIKADKAHAAGVTGSGVKVAILDTGIDANHADLNVKGGASFVTGEPNALQDGNGHGTHVAGTVAALDNTTGVLGVAYNADLYAVKVLSASGSGTLSGIAQGIEWSISNGMNVINMSLGSFFGSTALQQACNNAYNRGIVVIAAAGNSGSSGNRNTMGYPARYSSVIAVGAVSSNNTRASFSSVGSELEVMAPGVNILSTTPGNNYASFNGTSMAAPHVAGAAALIKAKYPSMTNVQIRERLKNTATNLGDPFFYGKGVINVESALQ

SEQ ID NO: 69577 - protein, 275 aa, Bacillus sp. LG1
AQTVPWGIPHIKADKAHAAGVTGSGVKVAILDTGIDANHADLNVKGGASFVSLEPNALQDGNGHGTHVAGTVAALNNTTGVLGVAYNADLYAVKVLSASGSGTLSGIAQGIEWSISNGMNVINMSLGGSSGSTALQQACNNAYNRGIVVIAAAGNSGSSGNRNTMGYPARYSSVIAVGAVSSNNTRASFSSVGSELEVMAPGVNILSTTPGNNYASFNGTSMAAPHVAGAAALIKAKYPSMTNVQIRERLKNTATNLGDPFFYGKGVINVESALQ

SEQ ID NO: 69578 - protein, 275 aa, Bacillus sp. LG1
AQTVMWGIPHIKADKAHAAGVTGSGVKVAILDTGIDANHADLNVKGGASFVSGEPNALQDGNGHGTHVAGTVAALNNTTGVLGVAYNADLYAVKVLSASGSGTLSGIAQGIEWSISNGMNVINMSLGGSSGSTALQQACNNAYNRGIVVIAAAGNSGSSGNRNTMGYPARYSSVIAVGAVSSNNTRASFSSVGSELEVMAPGVNILSTTPGNNYASFNGTSMAAPHVAGAAALIKAKYPSMTNVQIRERLKNTATNLGDPFFYGKGVINVESALQ

SEQ ID NO: 69579 - protein, 275 aa, Bacillus sp. LG1
AQTVPWGIPHIKADKAHAAGVTGSGVKVAILDTGIDANHADLNVKGGASFVSGEPNALQDGNGHGTHVAGTVAALNNTTGVLGVAYNADLYAVKVLSASGSGTLSGIAQGIEWSISNGMNVINMSLGGSSGSTALQQACNNAYNRGINVIAAAGNSGSSGNRNTMGYPARYSSVIAVGAVSSNNTRASFSSVGSELEVMAPGVNILSTTPGNNYASFNGTSMAAPHVAGAAALIKAKYPSMTNVQIRERLKNTATNLGDPFFYGKGVINVESALQ

SEQ ID NO: 69580 - protein, 275 aa, Bacillus sp. LG1
AQTVPWGIPHIKADKAHAAGVTGSGVKVAILDTGIDANHADMNVKGGASFVSGEPNALQDGNGHGTHVAGTVAALNNTTGVLGVAYNADLYAVKVLSASGSGTLSGIAQGIEWSISNGMNVINMSLGGSSGSTALQQACNNAYNRGIVVIAAAGNSGSSGNRNTMGYPARYSSVIAVGAVSSNNTRASFSSVGSELEVMAPGVNILSTTPGNNYASFNGTSMAAPHVAGAAALIKAKYPSMTNVQIRERLKNTATNLGDPFFYGKGVINVESALQ

SEQ ID NO: 69581 - protein, 275 aa, Bacillus sp. LG1
AQTVPWGIPHIKADKAHAAGVTGSGVKVAILDTGIDANHADLNVKGGASFVSGEPNALQDGNGHGTHVAGTVAALNNTTGVLGVAYNADLYAVKVLSASGSGTLSGIAQGIEWSISNGMNVINMSLGGSSGSTALQQACNNAYNRGIVVIAAAGNSGSSGNRNTMGYPARYSSVIAVGAVSSNNTRASFSSVGSELEVMAPGVNILSTTPGNNYYSFNGTSMAAPHVAGAAALIKAKYPSMTNVQIRERLKNTATNLGDPFFYGKGVINVESALQ

SEQ ID NO: 69582 - protein, 275 aa, Bacillus sp. LG1
AQTVPWGIPHIKADKAHAAGVTGSGVKVAILDTGIDANHADLNVKGGASFVSGEPNALQDGNGHGTHVAGTVAALNNTTGVLGVAYNADLYAVKVLSASGSGTLSGIAQGIEWSISNGMNVINMSQGGSSGSTALQQACNNAYNRGIVVIAAAGNSGSSGNRNTMGYPARYSSVIAVGAVSSNNTRASFSSVGSELEVMAPGVNILSTTPGNNYASFNGTSMAAPHVAGAAALIKAKYPSMTNVQIRERLKNTATNLGDPFFYGKGVINVESALQ

SEQ ID NO: 69583 - protein, 275 aa, Bacillus sp. LG1
AQTVPWGIPHIKADKAHAAGVTGSGVKVAILDTGIDANHADLNVKGGASFVSGEPNALQDGNGHGTHVAGTVAALNNTTGVLGVAYNADLYAVKVLSASGSGTLSGIAQGIEWSISNGMNVINMSLGGSSGSTALQQACNNAYNRGIVVIAAAGNSGSSGNRNTMGYPARYSSVIAVGAVSSNNTRASFSSVGSELEVMAPGVNILSTTPGNNYASFNGTSMAAPHVAGAAALIKAKYPSMTNVQIRERLKNTATNVGDPFFYGKGVINVESALQ

SEQ ID NO: 69584 - protein, 275 aa, Bacillus sp. LG1
AQTVPWGIPHIKADKAHAAGVTGSGVKVAILDTGIDANHADLNVKGGASFVSGEPNALQDGNGHGTHVAGTVAALNNTTGVLGVAYNADLYAVKVLSASGSGTLSGIAQGIEWSISNGMNVINMSLGGSSGSTALQQACNNAYNRGIVVIAAAGNSGSSGNRNTMGYPARYSSVIAVGAVSSNNTRASFSSVGSELEVMAPGVNILSTTPGNNYASFNGTSMAAPHVAGAAALIKAKYTSMTNVQIRERLKNTATNLGDPFFYGKGVINVESALQ

SEQ ID NO: 69585 - protein, 275 aa, Bacillus amyloliquefaciens
AQSVPYGVEQIKAPALHSQGYTGSNVKVAVIDSGIDSSHPDLKVAGGASMVPSETNPFQDNNGHGTHVAGTVAALNNSIGVLGVAPSASLYAVKVLGADGSGQYSWIINGIEWAIANNMDVINMSLGGPSGSAALKAAVDKAVASGVVVVAAAGNEGTSGSSSTVGYPGKYPSVIAVGAVDSSNQRASFSSVGPELDVMAPGVSIQSTWPGNKYAALNGTSMASPHVAGAAALILSKHPNWTNTQVRSSLENTTTKLGDSFYYGKGLINVQAAAQ

SEQ ID NO: 69586 - protein, 275 aa, Bacillus sp. LG1
AQTVPWGIPHIKADKAHAAGVTGSGVKVAILDTGIDANHADLNVKGGASFVSGEPNALQDGNGHGTHVAGTVAALNNTLGVLGVAYNADLYAVKVLSASGSGTLSGIAQGIEWSISNGMNVINMSLGGSSGSTALQQACNNAYNRGIVVIAAAGNSGSSGNRNTMGYPARYSSVIAVGAVSSNNTRASFSSVGSELEVMAPGVNILSTTPGNNYASFNGTSMAAPHVAGAAALIKAKYPSMTNVQIRERLKNTATNLGDPFFYGKGVINVESALQ

SEQ ID NO: 69587 - protein, 275 aa, Bacillus sp. LG1
AQTVPWGIPHIKADKAHAAGVTGSGVKVAILDTGIDANHADLNVKGGASFVSGEPNALQDGNGHGTHVAGTVAALNNTTGVLGVAYNADLYAVKVLSASGSGTLSGIAQGIEWSISNGMNVINMSLGGSSGSTALQQACNNAYNRGIVVIAAAGNSGSSGNRNTMGYPARYSSVIAVGAVSSNNTRASFSSVGSELEVMAPGVNILSTTPGNNYNSFNGTSMAAPHVAGAAALIKAKYPSMTNVQIRERLKNTATNLGDPFFYGKGVINVESALQ

SEQ ID NO: 69588 - protein, 275 aa, Bacillus sp. LG1
AQTVPWGIPHIKADKAHAAGVTGSGVKVAILDTGIDANHADLNVKGGASFVSGEPNALQDGNGHGTHVAGTVAALNNTTGVLGVAYNADLYAVKVLSASGSGTLSGIAQGIEWSISNGMNVINMSLGGSSGSTALQQACNNAYNRGIVVIAAAGNSGGSGNRNTMGYPARYSSVIAVGAVSSNNTRASFSSVGSELEVMAPGVNILSTTPGNNYASFNGTSMAAPHVAGAAALIKAKYPSMTNVQIRERLKNTATNLGDPFFYGKGVINVESALQ

SEQ ID NO: 69589 - protein, 275 aa, Bacillus sp. LG1
AQTVPWGIPHIKADKAHAAGVTGSGVKVAILDTGIDANHADLNVKGGASFVSGEPNALQDGNGHGTHVAGTVAALNNTTGVLGVAYNADLYAVKVLSASGSGTLSGIAQGIEWSISNGMNVINMSLGGSSGSTALQQACNNAYNRGISVIAAAGNSGSSGNRNTMGYPARYSSVIAVGAVSSNNTRASFSSVGSELEVMAPGVNILSTTPGNNYASFNGTSMAAPHVAGAAALIKAKYPSMTNVQIRERLKNTATNLGDPFFYGKGVINVESALQ

SEQ ID NO: 69590 - protein, 275 aa, Bacillus sp. LG1
AQTVPWGIPHIKADKAHAAGVTGSGVKVAILDTGIDANHADLNVKGGASFVSGEPNALQDGNGHGTHVAGTVAALNNTTGVLGVAYNADLYAVKVLSASGSGTLSGIAQGIEWSISNGMNVINMSLGGSSGSTALQQACNNAYNRGIVVIAAAGNKGSSGNRNTMGYPARYSSVIAVGAVSSNNTRASFSSVGSELEVMAPGVNILSTTPGNNYASFNGTSMAAPHVAGAAALIKAKYPSMTNVQIRERLKNTATNLGDPFFYGKGVINVESALQ

SEQ ID NO: 69591 - protein, 275 aa, Bacillus sp.
AQTVPWGIPHIKADKAHAAGVTGSGVKVAILDTGIDANHADLNVKGGASFVSGEPNALQDGNGHGTHVAGTVAALDNTTGVLGVAYNADLYAVKVLSASGSGTLSGIAQGIEWSISNRMNVINMSLGGIAGSTALQQACNNAYNRGIVVIAAAGNSGSSGNRNTMDYPARYSSVIAVGAVSSNNTRASFSSVGSELEVMAPGVNILSTTPGNNYASFNGTSMAAPHVAGAAALIKAKYPSMTNVQIRNRLKNTATNLGDPFFYGKGVINVESALQ

SEQ ID NO: 69592 - protein, 275 aa, Bacillus sp. LG1
AQTVPWGIPHIKADKAHAAGVTGSGVKVAILDTGIDANHADLNVKGGASFVSGEPNALQDGNGHGTHVAGTVLALNNTTGVLGVAYNADLYAVKVLSASGSGTLSGIAQGIEWSISNGMNVINMSLGGSSGSTALQQACNNAYNRGIVVIAAAGNSGSSGNRNTMGYPARYSSVIAVGAVSSNNTRASFSSVGSELEVMAPGVNILSTTPGNNYASFNGTSMAAPHVAGAAALIKAKYPSMTNVQIRERLKNTATNLGDPFFYGKGVINVESALQ

SEQ ID NO: 69593 - protein, 275 aa, Bacillus sp. LG1
AQTVPWGIPHIKADKAHAAGVTGSGVKVAILDTGIDANHADLNVKGGARFVSGEPNALQDGNGHGTHVAGTVAALNNTTGVLGVAYNADLYAVKVLSASGSGTLSGIAQGIEWSISNGMNVINMSLGGSSGSTALQQACNNAYNRGIVVIAAAGNSGSSGNRNTMGYPARYSSVIAVGAVSSNNTRASFSSVGSELEVMAPGVNILSTTPGNNYASFNGTSMAAPHVAGAAALIKAKYPSMTNVQIRERLKNTATNLGDPFFYGKGVINVESALQ

SEQ ID NO: 69594 - protein, 275 aa, Bacillus sp. LG1
AQTVPWGIPHIKADKAHAAGVTGSGVKVAILDTGIDANHADLNVKGGASFVSGEPNALQDGNGHGTHVAGTVAAFNNTTGVLGVAYNADLYAVKVLSASGSGTLSGIAQGIEWSISNGMNVINMSLGGSSGSTALQQACNNAYNRGIVVIAAAGNSGSSGNRNTMGYPARYSSVIAVGAVSSNNTRASFSSVGSELEVMAPGVNILSTTPGNNYASFNGTSMAAPHVAGAAALIKAKYPSMTNVQIRERLKNTATNLGDPFFYGKGVINVESALQ

SEQ ID NO: 69595 - protein, 275 aa, Bacillus sp. LG1
AQTVPWGIPHIKADKAHAAGVTGSGVKVAILDTGIDANHADLNVKGGASFVSGEPNALQDGNGHGTHVAGTVAALNNTTGVLGVAYNADLYAVKVLSASGSGTLSGIAQGIEWSISNLMNVINMSLGGSSGSTALQQACNNAYNRGIVVIAAAGNSGSSGNRNTMGYPARYSSVIAVGAVSSNNTRASFSSVGSELEVMAPGVNILSTTPGNNYASFNGTSMAAPHVAGAAALIKAKYPSMTNVQIRERLKNTATNLGDPFFYGKGVINVESALQ

SEQ ID NO: 69596 - protein, 275 aa, Bacillus sp. LG1
AQTVPWGIPHIKADKAHAAGVTGSGVKVAILDTGIDANHADLNVKGGASFVSGEPNALQDGNGHGTHVAGTVAALNNTTGVLGVAYNADLYAVKVLSASGSGTLSGIAQGIEWSISNGMNVINMSLGGSSGSTALQQACNNAYNRGIVVIAAAGNSGSSGNRNTMGYPARYSSVIAVGAVSSNNTRASKSSVGSELEVMAPGVNILSTTPGNNYASFNGTSMAAPHVAGAAALIKAKYPSMTNVQIRERLKNTATNLGDPFFYGKGVINVESALQ

SEQ ID NO: 69597 - protein, 275 aa, Bacillus sp. LG1
AQTVPWGIPHIKADKAHAAGVTGSGVKVAILDTGIDANHADLNVKGGASFVSGEPNALQDGNGHGTHVAGTVAALNNTTGVLGVAYNADLYAVKVLSALGSGTLSGIAQGIEWSISNGMNVINMSLGGSSGSTALQQACNNAYNRGIVVIAAAGNSGSSGNRNTMGYPARYSSVIAVGAVSSNNTRASFSSVGSELEVMAPGVNILSTTPGNNYASFNGTSMAAPHVAGAAALIKAKYPSMTNVQIRERLKNTATNLGDPFFYGKGVINVESALQ

SEQ ID NO: 69598 - protein, 275 aa, Bacillus amyloliquefaciens
AQSVPYGVSQIKAPALHSQGYTGSNVKVAVIDSGIDSSHPDLKVAGGASMVPSETNPFQDNNSHGTHVAGTVAALNNSIGVLGVAPSASLYAVKVLRSSGSGQYSWIINGIEWAIANNMDVINMSLGGPSGSAALKAAVDKAVASGVVVVAAAGNEGTSGSSSTVGYPGKYPSVIAVGAVDSSNQRASFSSVGPELDVMAPGVSIQSTLPGNKYGALNGTSMASPHVAGAAALILSKHPNWTNTQVRSSLENTTTKLGDSFYYGKGLINVQAAAQ

SEQ ID NO: 69599 - protein, 275 aa, Bacillus sp. LG1
AQTVPWGIPHIKADKAHAAGVTGSGVKVAILDTGIDANHADLNVKGGASFVSGEPNALQSGNGHGTHVAGTVAALNNTTGVLGVAYNADLYAVKVLSASGSGTLSGIAQGIEWSISNGMNVINMSLGGSSGSTALQQACNNAYNRGIVVIAAAGNSGSSGNRNTMGYPARYSSVIAVGAVSSNNTRASFSSVGSELEVMAPGVNILSTTPGNNYASFNGTSMAAPHVAGAAALIKAKYPSMTNVQIRERLKNTATNLGDPFFYGKGVINVESALQ

SEQ ID NO: 69600 - protein, 275 aa, Bacillus sp. LG1
AQTVPWGIPHIKADKAHAAGVTGSGVKVAILDTGIDANHADLNVKGGASFVSGEPNALQDGNGHGTHVAGTVAALNNTTGVLGVAYNADLYAVKVLSASGSGTLSGIAQGIEWSISNGMNVINMSLGGSSGSTALQQACNNAYNRGIVVIAAAGNSGSSGNRNTMGYPARYSSVIAVGAVSANNTRASFSSVGSELEVMAPGVNILSTTPGNNYASFNGTSMAAPHVAGAAALIKAKYPSMTNVQIRERLKNTATNLGDPFFYGKGVINVESALQ

SEQ ID NO: 69601 - protein, 275 aa, Bacillus sp. LG1
AQTVPWGIPHIKADKAHAAGVTGSGVKVAILDTGIDANHADLNVKGGASFVSGEPNALQDGNGHGTHVAGTVAALNNTTGVLGVAYNADLYAVKVLSASGSGTLSGIAQGIEWSISNGMNVINMSLGGSSGSTALQQACNNAYNRGIVVIAAAGNSGSSGNRNTMGYPARYSSVIAVGAVSSNNTRASVSSVGSELEVMAPGVNILSTTPGNNYASFNGTSMAAPHVAGAAALIKAKYPSMTNVQIRERLKNTATNLGDPFFYGKGVINVESALQ

SEQ ID NO: 69602 - protein, 275 aa, Bacillus sp. LG1
AQTVPWGIPHIKADKAHAAGVTGSGVKVAILDTGIDHNHADLNVKGGASFVSGEPNALQDGNGHGTHVAGTVAALNNTTGVLGVAYNADLYAVKVLSASGSGTLSGIAQGIEWSISNGMNVINMSLGGSSGSTALQQACNNAYNRGIVVIAAAGNSGSSGNRNTMGYPARYSSVIAVGAVSSNNTRASFSSVGSELEVMAPGVNILSTTPGNNYASFNGTSMAAPHVAGAAALIKAKYPSMTNVQIRERLKNTATNLGDPFFYGKGVINVESALQ

SEQ ID NO: 69603 - protein, 275 aa, Bacillus sp. LG1
AQTVPWGIPHIKADKAHAAGVTGSGVKVAILDTGIDANHADLNVKGGASFVSGEPNALQDGNGHGTHVAGTVAALNNTTGVLGVAYNADLHAVKVLSASGSGTLSGIAQGIEWSISNGMNVINMSLGGSSGSTALQQACNNAYNRGIVVIAAAGNSGSSGNRNTMGYPARYSSVIAVGAVSSNNTRASFSSVGSELEVMAPGVNILSTTPGNNYASFNGTSMAAPHVAGAAALIKAKYPSMTNVQIRERLKNTATNLGDPFFYGKGVINVESALQ

SEQ ID NO: 69604 - protein, 275 aa, Bacillus sp. LG1
AQTVPWGIPHIKADKAHAAGVTGSGVKVAILDTGIDANHADLNVKGGASFVSGEPNALQDGNGHGTHVAGTVAALNNTTGVLGVAYNADLYAVKVLSASGSGTLSGIAQGIEWSISNGMNVINMSLGGSSGSTALQQACNNAYNRGIVVIAAAGNSGSSGNRNTMGAPARYSSVIAVGAVSSNNTRASFSSVGSELEVMAPGVNILSTTPGNNYASFNGTSMAAPHVAGAAALIKAKYPSMTNVQIRERLKNTATNLGDPFFYGKGVINVESALQ

SEQ ID NO: 69605 - protein, 275 aa, Bacillus sp. LG1
AQTVPWGIPHIKADKAHAAGVTGSGVKVAILDTGIDANHADLNVKGGASFVSGEPNALQDGNGHGTHVAGTVAALNNTTGVLGVAYNADLYAVKVLSASGSGTLSGIAQGIEWSISNGMNVINMSLGGSSGSTALQQACNNAYNRGIVVIAAAGNSGSSGNRNTMGYPARYSSVIAVGAVSSNNTRASQSSVGSELEVMAPGVNILSTTPGNNYASFNGTSMAAPHVAGAAALIKAKYPSMTNVQIRERLKNTATNLGDPFFYGKGVINVESALQ

SEQ ID NO: 69606 - protein, 275 aa, Bacillus sp. LG1
AQTVPWGIPHIKADKAHAAGVTGSGVKVAILDTGIDANHADLNVKGGASFVSGEPNALQDGNGHGTHVAGTVAALNNTTGVLGVAYNADLMAVKVLSASGSGTLSGIAQGIEWSISNGMNVINMSLGGSSGSTALQQACNNAYNRGIVVIAAAGNSGSSGNRNTMGYPARYSSVIAVGAVSSNNTRASFSSVGSELEVMAPGVNILSTTPGNNYASFNGTSMAAPHVAGAAALIKAKYPSMTNVQIRERLKNTATNLGDPFFYGKGVINVESALQ

SEQ ID NO: 69607 - protein, 275 aa, Bacillus sp. LG1
AQTVPWGIPHIKADKAHAAGVTGSGVKVAILDTGIDANHADLNVKGGASFASGEPNALQDGNGHGTHVAGTVAALNNTTGVLGVAYNADLYAVKVLSASGSGTLSGIAQGIEWSISNGMNVINMSLGGSSGSTALQQACNNAYNRGIVVIAAAGNSGSSGNRNTMGYPARYSSVIAVGAVSSNNTRASFSSVGSELEVMAPGVNILSTTPGNNYASFNGTSMAAPHVAGAAALIKAKYPSMTNVQIRERLKNTATNLGDPFFYGKGVINVESALQ

SEQ ID NO: 69608 - protein, 275 aa, Bacillus sp. LG1
AQTVPWGIPHIKADKAHAAGVTGSGVKVAILDTGIDANHADLNVKGGASFVSGEPNALQDGNGHGTHVAGTVAALNNTTGVLGVAYNADLYAVKVLSASGSGTLSGIAQGIEWSISNGMNVINMSLGGSSGSTALQQACNNAYNRGIVVIAAAGNSGSSGNRNTMGYPARYSSVIAVGAVSSNNTRASFSSVGSELEVMAPGVNILSTTPGNNYASFNGTSMAAPHVAGAAATIKAKYPSMTNVQIRERLKNTATNLGDPFFYGKGVINVESALQ

SEQ ID NO: 69609 - protein, 275 aa, Bacillus sp. LG1
AQTVPWGIPHIKADKAHAAGVTGSGVKVAILDTGIDANHADLNVKGGASFVSGEPNALQMGNGHGTHVAGTVAALNNTTGVLGVAYNADLYAVKVLSASGSGTLSGIAQGIEWSISNGMNVINMSLGGSSGSTALQQACNNAYNRGIVVIAAAGNSGSSGNRNTMGYPARYSSVIAVGAVSSNNTRASFSSVGSELEVMAPGVNILSTTPGNNYASFNGTSMAAPHVAGAAALIKAKYPSMTNVQIRERLKNTATNLGDPFFYGKGVINVESALQ

SEQ ID NO: 69610 - protein, 275 aa, Bacillus sp. LG1
AQTVPWGIPHIKADKAHAAGVTGSGVKVAILDTGIDANHADLNVKGGASFVSGEPNALQDGNMHGTHVAGTVAALNNTTGVLGVAYNADLYAVKVLSASGSGTLSGIAQGIEWSISNGMNVINMSLGGSSGSTALQQACNNAYNRGIVVIAAAGNSGSSGNRNTMGYPARYSSVIAVGAVSSNNTRASFSSVGSELEVMAPGVNILSTTPGNNYASFNGTSMAAPHVAGAAALIKAKYPSMTNVQIRERLKNTATNLGDPFFYGKGVINVESALQ

SEQ ID NO: 69611 - protein, 275 aa, Bacillus sp. LG1
AQTVPWGIPHIKADKAHAAGVTGSGVKVAILDTGIDANHADLNVKGGASFVSGEPNALQDGNGHGTHVAGTVAALNNTTMVLGVAYNADLYAVKVLSASGSGTLSGIAQGIEWSISNGMNVINMSLGGSSGSTALQQACNNAYNRGIVVIAAAGNSGSSGNRNTMGYPARYSSVIAVGAVSSNNTRASFSSVGSELEVMAPGVNILSTTPGNNYASFNGTSMAAPHVAGAAALIKAKYPSMTNVQIRERLKNTATNLGDPFFYGKGVINVESALQ

SEQ ID NO: 69612 - protein, 275 aa, Bacillus sp.
AQTVPWGIPHIKADKAHAAGVTGSGVKVAILDTGIDANHADLNVKGGASFVSGEPNALQDGNGHGTHVAGTVAALDNTTGVLGVAYNADLYAVKVLSASGSGTLSGIAQGIEWSISNRMNVINMSLGSQSGSTALQQACNNAYNRGIVVIAAAGNSGSSGNRNTMDYPARYSSVIAVGAVSSNNTRASFSSVGSELEVMAPGVNILSTTPGNNYASFNGTSMAAPHVAGAAALIKAKYPSMTNVQIRNRLKNTATNLGDPFFYGKGVINVESALQ

SEQ ID NO: 69613 - protein, 275 aa, Bacillus sp. LG1
AQTVPWGIPHIKADKAHAAGVTGSGVKVAILDTGIDANHADLNVKGGASFVSGEPNALQDGNGHGTHVGGTVAALNNTTGVLGVAYNADLYAVKVLSASGSGTLSGIAQGIEWSISNGMNVINMSLGGSSGSTALQQACNNAYNRGIVVIAAAGNSGSSGNRNTMGYPARYSSVIAVGAVSSNNTRASFSSVGSELEVMAPGVNILSTTPGNNYASFNGTSMAAPHVAGAAALIKAKYPSMTNVQIRERLKNTATNLGDPFFYGKGVINVESALQ

SEQ ID NO: 69614 - protein, 275 aa, Bacillus sp. LG1
AQTVPWGIPHIKADKAHAAGVTGSGVKVAILDTGIDANHADTNVKGGASFVSGEPNALQDGNGHGTHVAGTVAALNNTTGVLGVAYNADLYAVKVLSASGSGTLSGIAQGIEWSISNGMNVINMSLGGSSGSTALQQACNNAYNRGIVVIAAAGNSGSSGNRNTMGYPARYSSVIAVGAVSSNNTRASFSSVGSELEVMAPGVNILSTTPGNNYASFNGTSMAAPHVAGAAALIKAKYPSMTNVQIRERLKNTATNLGDPFFYGKGVINVESALQ

SEQ ID NO: 69615 - protein, 275 aa, Bacillus sp. LG1
AQTVPWGIPHIKADKAHAAGVTGSGVKVAILDTGIDANHADLHVKGGASFVSGEPNALQDGNGHGTHVAGTVAALNNTTGVLGVAYNADLYAVKVLSASGSGTLSGIAQGIEWSISNGMNVINMSLGGSSGSTALQQACNNAYNRGIVVIAAAGNSGSSGNRNTMGYPARYSSVIAVGAVSSNNTRASFSSVGSELEVMAPGVNILSTTPGNNYASFNGTSMAAPHVAGAAALIKAKYPSMTNVQIRERLKNTATNLGDPFFYGKGVINVESALQ

SEQ ID NO: 69616 - protein, 275 aa, Bacillus sp. LG1
AQTVPWGIPHIKADKAHAAGVTGSGVKVGILDTGIDANHADLNVKGGASFVSGEPNALQDGNGHGTHVAGTVAALNNTTGVLGVAYNADLYAVKVLSASGSGTLSGIAQGIEWSISNGMNVINMSLGGSSGSTALQQACNNAYNRGIVVIAAAGNSGSSGNRNTMGYPARYSSVIAVGAVSSNNTRASFSSVGSELEVMAPGVNILSTTPGNNYASFNGTSMAAPHVAGAAALIKAKYPSMTNVQIRERLKNTATNLGDPFFYGKGVINVESALQ

SEQ ID NO: 69617 - protein, 275 aa, Bacillus sp. LG1
AQTVPWGIPHIKADKAHAAGVTGSGVKVAILDTGIDANHADLNVKGGASFVSGEPNALQDGNGHGTHVAGTVAALNNETGVLGVAYNADLYAVKVLSASGSGTLSGIAQGIEWSISNGMNVINMSLGGSSGSTALQQACNNAYNRGIVVIAAAGNSGSSGNRNTMGYPARYSSVIAVGAVSSNNTRASFSSVGSELEVMAPGVNILSTTPGNNYASFNGTSMAAPHVAGAAALIKAKYPSMTNVQIRERLKNTATNLGDPFFYGKGVINVESALQ

SEQ ID NO: 69618 - protein, 275 aa, Bacillus sp. LG1
AQTVPWGIPHIKAFKAHAAGVTGSGVKVAILDTGIDANHADLNVKGGASFVSGEPNALQDGNGHGTHVAGTVAALNNTTGVLGVAYNADLYAVKVLSASGSGTLSGIAQGIEWSISNGMNVINMSLGGSSGSTALQQACNNAYNRGIVVIAAAGNSGSSGNRNTMGYPARYSSVIAVGAVSSNNTRASFSSVGSELEVMAPGVNILSTTPGNNYASFNGTSMAAPHVAGAAALIKAKYPSMTNVQIRERLKNTATNLGDPFFYGKGVINVESALQ

SEQ ID NO: 69619 - protein, 275 aa, Bacillus sp. LG1
AQTVPWGIPHIKADKAHAAGVTGSGVKVAILDTGIDANHADLNVKGGASFVSGEPNALQDGNGHGTHVAGTVAALNNTTGVLGVAYNADLYAVKVLSASGSGTLSGIAQGIEWSISNGMNVINMSLGGSSGSQALQQACNNAYNRGIVVIAAAGNSGSSGNRNTMGYPARYSSVIAVGAVSSNNTRASFSSVGSELEVMAPGVNILSTTPGNNYASFNGTSMAAPHVAGAAALIKAKYPSMTNVQIRERLKNTATNLGDPFFYGKGVINVESALQ

SEQ ID NO: 69620 - protein, 275 aa, Bacillus sp. LG1
AQTVPWGIPHIKADKAHAAGVTGSGVKVAILDTGIDANHADLNVKGGASKVSGEPNALQDGNGHGTHVAGTVAALNNTTGVLGVAYNADLYAVKVLSASGSGTLSGIAQGIEWSISNGMNVINMSLGGSSGSTALQQACNNAYNRGIVVIAAAGNSGSSGNRNTMGYPARYSSVIAVGAVSSNNTRASFSSVGSELEVMAPGVNILSTTPGNNYASFNGTSMAAPHVAGAAALIKAKYPSMTNVQIRERLKNTATNLGDPFFYGKGVINVESALQ

SEQ ID NO: 69621 - protein, 275 aa, Bacillus sp. LG1
AQTVPWGIPHIKADKAHAAGVTGSGVKVAILDTGIDANHADLNVKGGASFVSGEPNALQDGNGHGTHVAGTVAALNNTTGVLGVAYNADLYAVKVLSASGSGTLSGIAQGIEWSISNGMNVINMSLGGSSGSTALQQACNNAYNRGIVVIAAAGNSGSSGNRNTMGYPARYSSVIAVGAVSSNNTRASSSSVGSELEVMAPGVNILSTTPGNNYASFNGTSMAAPHVAGAAALIKAKYPSMTNVQIRERLKNTATNLGDPFFYGKGVINVESALQ

SEQ ID NO: 69622 - protein, 275 aa, Bacillus sp. LG1
AQTVPWGIPHIKADKAHAAGVTGSGVDVAILDTGIDANHADLNVKGGASFVSGEPNALQDGNGHGTHVAGTVAALNNTTGVLGVAYNADLYAVKVLSASGSGTLSGIAQGIEWSISNGMNVINMSLGGSSGSTALQQACNNAYNRGIVVIAAAGNSGSSGNRNTMGYPARYSSVIAVGAVSSNNTRASFSSVGSELEVMAPGVNILSTTPGNNYASFNGTSMAAPHVAGAAALIKAKYPSMTNVQIRERLKNTATNLGDPFFYGKGVINVESALQ

SEQ ID NO: 69623 - protein, 275 aa, Bacillus sp. LG1
AQTVPWGIPHIKADKAHAAGVTGSGVKVAILDTGIDANHADLNVKGGASFVSGEPNALQDGNGHGTHVAGTVAALNNTTGVLGVAYNADLYAVKVLSASGSGTLSGIAQGIEWSISNGMNVINMSLGGSSGSTALQQACNNAYNRGIVVIAAAGNSGSSGNRNTMGYPARYSSVIAVGAVSSNNTRASFSSVGSELEVMAPGVNILSTTPGNNYASFNGTSMAAPHVAGAAALIKAKYPSMTNVQIRERLKNTATNMGDPFFYGKGVINVESALQ

SEQ ID NO: 69624 - protein, 275 aa, Bacillus sp. LG1
AQTVPWGIPHIKADKAHAAGVTGSGVKVAILDTGIDANHADLNVKGGANFVSGEPNALQDGNGHGTHVAGTVAALNNTTGVLGVAYNADLYAVKVLSASGSGTLSGIAQGIEWSISNGMNVINMSLGGSSGSTALQQACNNAYNRGIVVIAAAGNSGSSGNRNTMGYPARYSSVIAVGAVSSNNTRASFSSVGSELEVMAPGVNILSTTPGNNYASFNGTSMAAPHVAGAAALIKAKYPSMTNVQIRERLKNTATNLGDPFFYGKGVINVESALQ

SEQ ID NO: 69625 - protein, 275 aa, Bacillus sp. LG1
AQTVPWGIPHIKADKAHAAGVTGSGVKVAILDTGIDANHADLNVKGGASFVSGEPNALQDGNGHGTHVAGTVAALNNTTGVLGVAYNADLYAVKVLSASGSGTLSGIAQGIEWSISNGMNVINMSLGGSEGSTALQQACNNAYNRGIVVIAAAGNSGSSGNRNTMGYPARYSSVIAVGAVSSNNTRASFSSVGSELEVMAPGVNILSTTPGNNYASFNGTSMAAPHVAGAAALIKAKYPSMTNVQIRERLKNTATNLGDPFFYGKGVINVESALQ

SEQ ID NO: 69626 - protein, 275 aa, Bacillus sp. LG1
AQTVPWGIPHIKADKAHAAGVTGSGVKVAILDTGIDANHADLNVKGGASFVSGEPNALQDGNGHGTHVAGTVAALNNTTGVLGVAYNADLYAVKVLSASGSGTLSGIAQGIEWSISNGMNVINMSLGGSSGSTALQQACNNAYNRGIVVIAAAGNSGSSGNRNTMLYPARYSSVIAVGAVSSNNTRASFSSVGSELEVMAPGVNILSTTPGNNYASFNGTSMAAPHVAGAAALIKAKYPSMTNVQIRERLKNTATNLGDPFFYGKGVINVESALQ

SEQ ID NO: 69627 - protein, 275 aa, Bacillus sp. LG1
AQTVPWGIPHIKADKAHAAGVTGSGVKVAILDTGIDANHADLWVKGGASFVSGEPNALQDGNGHGTHVAGTVAALNNTTGVLGVAYNADLYAVKVLSASGSGTLSGIAQGIEWSISNGMNVINMSLGGSSGSTALQQACNNAYNRGIVVIAAAGNSGSSGNRNTMGYPARYSSVIAVGAVSSNNTRASFSSVGSELEVMAPGVNILSTTPGNNYASFNGTSMAAPHVAGAAALIKAKYPSMTNVQIRERLKNTATNLGDPFFYGKGVINVESALQ

SEQ ID NO: 69628 - protein, 275 aa, Bacillus sp. LG1
AQTVPWGIPHIKADKAHAAGVTGSGVKVAILDTGIDANHADLNVKGGASAVSGEPNALQDGNGHGTHVAGTVAALNNTTGVLGVAYNADLYAVKVLSASGSGTLSGIAQGIEWSISNGMNVINMSLGGSSGSTALQQACNNAYNRGIVVIAAAGNSGSSGNRNTMGYPARYSSVIAVGAVSSNNTRASFSSVGSELEVMAPGVNILSTTPGNNYASFNGTSMAAPHVAGAAALIKAKYPSMTNVQIRERLKNTATNLGDPFFYGKGVINVESALQ

SEQ ID NO: 69629 - protein, 275 aa, Bacillus sp. LG1
AQTVPWGIPHIKADKAHAAGVTGSGVKVAILDTGIDANHADLNVKGGASFVSPEPNALQDGNGHGTHVAGTVAALNNTTGVLGVAYNADLYAVKVLSASGSGTLSGIAQGIEWSISNGMNVINMSLGGSSGSTALQQACNNAYNRGIVVIAAAGNSGSSGNRNTMGYPARYSSVIAVGAVSSNNTRASFSSVGSELEVMAPGVNILSTTPGNNYASFNGTSMAAPHVAGAAALIKAKYPSMTNVQIRERLKNTATNLGDPFFYGKGVINVESALQ

SEQ ID NO: 69630 - protein, 275 aa, Bacillus sp. LG1
AQTVPWGIPHIKADKAHAAGVTGSGVKVAILDTGIDANHADLNVKGGASFVSGEPNALQDGNGHGTHVAGTVAALNNTTGVLGVAYNADLYAVKVLSASGSGTLSGIAQGIEWSISNGMNVINMSLGGSSGSTALQQACNNAYNRGIVVIAAAGNSGSSGNRNTMGFPARYSSVIAVGAVSSNNTRASFSSVGSELEVMAPGVNILSTTPGNNYASFNGTSMAAPHVAGAAALIKAKYPSMTNVQIRERLKNTATNLGDPFFYGKGVINVESALQ

SEQ ID NO: 69631 - protein, 275 aa, Bacillus sp. LG1
AQTVPWGIPHIKADKAHAAGVTGSGVKVAILDTGIDANHADLNVKGGASFVSGEPNALQDGNGHGTHVAGTVAALNNTTGVLGVAYNADLYAVKVNSASGSGTLSGIAQGIEWSISNGMNVINMSLGGSSGSTALQQACNNAYNRGIVVIAAAGNSGSSGNRNTMGYPARYSSVIAVGAVSSNNTRASFSSVGSELEVMAPGVNILSTTPGNNYASFNGTSMAAPHVAGAAALIKAKYPSMTNVQIRERLKNTATNLGDPFFYGKGVINVESALQ

SEQ ID NO: 69632 - protein, 275 aa, Bacillus sp. LG1
AQTVPWGIPHIKADKAHAAGVTGSGVKVAILDTGIDANHADLNVKGGASFVSGEPNALQDGNGHGTHVAGTVAALNNTTGVLGVAYNADLYAVKVLSASGSGTLSGIAQGIEWSISNGMNVINMSLGGSSGSTALQQACNNAYNRGIVVIAAAGNSGSSGNRNTMGYPARYSSVIAVGAVSSNNTRASFSSVGSELEVMAPGVNILSTTPGNNYASFNGTSMAAPGVAGAAALIKAKYPSMTNVQIRERLKNTATNLGDPFFYGKGVINVESALQ

SEQ ID NO: 69633 - protein, 275 aa, Bacillus amyloliquefaciens
AQSVPYGVSQIKAPALHSQGYTGSNVKVAVIDSGIDSSHPDLKVAGGASMVPGESXAFQDNNSHGTHVAGTVAALNNSIGVLGVAPSVSLYAVKVLGADGSGQYSWIINGIEWAIANNMDVINMSLGGPSGSAALKAAVDKAVASGVVVVAAAGNEGTSGSSSTVGYPGKYPSVIAVGAVDSSNQRASFSSVGPELDVMAPGVSIQSTLPGNKYGALNGTSMASPHVAGAAALILSKHPNWTNTQVRSSLENTTTKLGDSFYYGKGLINVQAAAQ

SEQ ID NO: 69634 - protein, 275 aa, Bacillus sp. LG1
AQTVPWGIPHIKADKAHAAGVTGSGVKVAILDTGIDANHADLKVKGGASFVSGEPNALQDGNGHGTHVAGTVAALNNTTGVLGVAYNADLYAVKVLSASGSGTLSGIAQGIEWSISNGMNVINMSLGGSSGSTALQQACNNAYNRGIVVIAAAGNSGSSGNRNTMGYPARYSSVIAVGAVSSNNTRASFSSVGSELEVMAPGVNILSTTPGNNYASFNGTSMAAPHVAGAAALIKAKYPSMTNVQIRERLKNTATNLGDPFFYGKGVINVESALQ

SEQ ID NO: 69635 - protein, 275 aa, Bacillus sp. LG1
AQTVPWGIPHIKADKAHAAGVTGSGVKVAILDTGIDANHADLNVKGGASFVSGEPNALQDGNGHGTHVAGTVAATNNTTGVLGVAYNADLYAVKVLSASGSGTLSGIAQGIEWSISNGMNVINMSLGGSSGSTALQQACNNAYNRGIVVIAAAGNSGSSGNRNTMGYPARYSSVIAVGAVSSNNTRASFSSVGSELEVMAPGVNILSTTPGNNYASFNGTSMAAPHVAGAAALIKAKYPSMTNVQIRERLKNTATNLGDPFFYGKGVINVESALQ

SEQ ID NO: 69636 - protein, 275 aa, Bacillus sp. LG1
AQTVPWGIPHIKADKAHAAGVTGSGVKVAILDTGIDANHADLNVKGGASFVSGEPNALQDGNGHGTHVAGTVAALNNTTGVLGVAYNADLYAVKVLSASGSGTLSGIAQGIEWSISNGMNVINMSLGGSSGSTALQQACNGAYNRGIVVIAAAGNSGSSGNRNTMGYPARYSSVIAVGAVSSNNTRASFSSVGSELEVMAPGVNILSTTPGNNYASFNGTSMAAPHVAGAAALIKAKYPSMTNVQIRERLKNTATNLGDPFFYGKGVINVESALQ

SEQ ID NO: 69637 - protein, 275 aa, Bacillus sp. LG1
AQTVPWGIPHIKADKAHAAGVTGSGVKVAILDTGIDANHADLNVKGGASFVSGEPNALQDGNGHGTHVAGTVAALNNTTGVLGVAYNADLYAVKVLSASGSGTLSGIAQGIEWSISNGMNVINMSLGGSSGSTALQQACNNAYNRGIVVIAAAGNSGSSGNRNTMGYPARYSSVIAVGAVSSNNTRASFSSVGSELEVMAPGVNILSTTPGLNYASFNGTSMAAPHVAGAAALIKAKYPSMTNVQIRERLKNTATNLGDPFFYGKGVINVESALQ

SEQ ID NO: 69638 - protein, 275 aa, Bacillus sp. LG1
AQTVPWGIPHIKADKAHAAGVTGSGVKVAILDTGIDANHADLNVKGGASFVSGEPNALQDGNGHGTHVAGTVAALNNTTGVLGVAYNADLYAVKVLSASGSGTLSGIAQGIEWSISNGMNVINMSLGGSSGSTALQQACNNAYNRGIVVIAAAGNSGSSGNRNTMGYPARYSSVIAVGAVSSNNTRASFSSVGSELEVMAPGVNILSTTPGNNYASFNGTSMAAPHVAGAAALIKAKYPSMTNVQIRERLKNTATNLGDPFFYGKGVINVFSALQ

SEQ ID NO: 69639 - protein, 275 aa, Bacillus sp. LG1
AQTVPWGIPHIKADKAHAAGVTGSGVKVAILDTGIDANHADLNVKGGASFVSGEPNALQDGNGHGTHVAGTVAALNNTTGVLGVAYNADLYAVKVLSASGSGTLSGIAQGIEWSISNGMNVINMSLGGSSGSTALQQACNNAYNRGIVVIAAAGNSGSSGNRNTMGYPARYSSVIAVGAVSDNNTRASFSSVGSELEVMAPGVNILSTTPGNNYASFNGTSMAAPHVAGAAALIKAKYPSMTNVQIRERLKNTATNLGDPFFYGKGVINVESALQ

SEQ ID NO: 69640 - protein, 275 aa, Bacillus sp.
AQTVPWGIPHIKADKAHAAGVTGSGVKVAILDTGIDANHADLNVKGGASFVSGEPNALQDGNGHGTHVAGTVAALDNTTGVLGVAYNADLYAVKVLSASGSGTLSGIAQGIEWSISNRMNVINMSLGGSSGSTALQQACNNAYNRGIVVIAAAGNSGSSGNRNTMDYPARYSSVIAVGAVSSNNTRASFSSVGSELEVMAPGVNILSTTPGNNYASFNGTSMAAPHVAGAAALIKAKYPSMTNVQIRERLKNTATNLGDPFFYGKGVINVESALQ

SEQ ID NO: 69641 - protein, 275 aa, Bacillus sp. LG1
AQTVPWGIPHIKADKAHAAGVTGSGVKVAILDTGIDANHADLNVKGGASFVSGEPNALQDGNGHGTHVAGTVAALNNTTGVLGVAYNADLYATKVLSASGSGTLSGIAQGIEWSISNGMNVINMSLGGSSGSTALQQACNNAYNRGIVVIAAAGNSGSSGNRNTMGYPARYSSVIAVGAVSSNNTRASFSSVGSELEVMAPGVNILSTTPGNNYASFNGTSMAAPHVAGAAALIKAKYPSMTNVQIRERLKNTATNLGDPFFYGKGVINVESALQ

SEQ ID NO: 69642 - protein, 275 aa, Bacillus sp. LG1
AQTVPWGIPHIKADKAHAAGVTGSGVKVAILDTGIDANHADLNVKGGASFVSGEPNALQDGNGHGTHVAGTVAALNNTTGVLGVAYNADLYAVKVLSASGSGTLSGIAQGIEWSISNGMNVINMSKGGSSGSTALQQACNNAYNRGIVVIAAAGNSGSSGNRNTMGYPARYSSVIAVGAVSSNNTRASFSSVGSELEVMAPGVNILSTTPGNNYASFNGTSMAAPHVAGAAALIKAKYPSMTNVQIRERLKNTATNLGDPFFYGKGVINVESALQ

SEQ ID NO: 69643 - protein, 275 aa, Bacillus sp. LG1
AQTVPWGIPHIKADKAHAAGVTGSGVKVAILDTGIDANHADLNVKGGASFMSGEPNALQDGNGHGTHVAGTVAALNNTTGVLGVAYNADLYAVKVLSASGSGTLSGIAQGIEWSISNGMNVINMSLGGSSGSTALQQACNNAYNRGIVVIAAAGNSGSSGNRNTMGYPARYSSVIAVGAVSSNNTRASFSSVGSELEVMAPGVNILSTTPGNNYASFNGTSMAAPHVAGAAALIKAKYPSMTNVQIRERLKNTATNLGDPFFYGKGVINVESALQ

SEQ ID NO: 69644 - protein, 275 aa, Bacillus sp. LG1
AQTVPWGIPHIKADKAHAAGVTGSGVKVAILDTGIDANHADLNVKGGWSFVSGEPNALQDGNGHGTHVAGTVAALNNTTGVLGVAYNADLYAVKVLSASGSGTLSGIAQGIEWSISNGMNVINMSLGGSSGSTALQQACNNAYNRGIVVIAAAGNSGSSGNRNTMGYPARYSSVIAVGAVSSNNTRASFSSVGSELEVMAPGVNILSTTPGNNYASFNGTSMAAPHVAGAAALIKAKYPSMTNVQIRERLKNTATNLGDPFFYGKGVINVESALQ

SEQ ID NO: 69645 - protein, 275 aa, Bacillus sp. LG1
AQTVPWGIPHIKADKAHAAGVTGSGVKVAILDTGIDANHADLNVKGGASFVSGEPNALQDGNGHGTHVAGTVAAVNNTTGVLGVAYNADLYAVKVLSASGSGTLSGIAQGIEWSISNGMNVINMSLGGSSGSTALQQACNNAYNRGIVVIAAAGNSGSSGNRNTMGYPARYSSVIAVGAVSSNNTRASFSSVGSELEVMAPGVNILSTTPGNNYASFNGTSMAAPHVAGAAALIKAKYPSMTNVQIRERLKNTATNLGDPFFYGKGVINVESALQ

SEQ ID NO: 69646 - protein, 275 aa, Bacillus sp. LG1
AQTVPWGIPHIKADKAHAAGVTGSGVKVAILDTGIDANHADLNVKGGASFVSGEPNALQDGNGHGTHVAGTVAALNNTTGVLGVAYNADLYAVKVLSASGSGTLSGIAQGIEWSISNGMNVINMSLGGSSGSTALQQACNNAYNRGIVVIAAAGNSGSSGNRNTMGYPARYSSVIAVGAVSSNNTRASFSSVGSELEVMAPGVNILSTTPGNNYASFNGTSMAAPHVAGAAALWKAKYPSMTNVQIRERLKNTATNLGDPFFYGKGVINVESALQ

SEQ ID NO: 69647 - protein, 275 aa, Bacillus sp. LG1
AQTVPWGIPHIKADKAHAAGVTGSGVKVAILDTGIDANHADLNVKGGASFVSGEPNALQDGNGHGTHVAGTVAALNNTTGVLGVAYNADLYAVKVLSASGSGTLSGIAQGIEWSISNGINVINMSLGGSSGSTALQQACNNAYNRGIVVIAAAGNSGSSGNRNTMGYPARYSSVIAVGAVSSNNTRASFSSVGSELEVMAPGVNILSTTPGNNYASFNGTSMAAPHVAGAAALIKAKYPSMTNVQIRERLKNTATNLGDPFFYGKGVINVESALQ

SEQ ID NO: 69648 - protein, 275 aa, Bacillus sp. LG1
AQTVPWGIPHIKADKAHAAGVTGSGVKVAILDTGIDANHADLNVKGGASFVSGEPNALQDGNHHGTHVAGTVAALNNTTGVLGVAYNADLYAVKVLSASGSGTLSGIAQGIEWSISNGMNVINMSLGGSSGSTALQQACNNAYNRGIVVIAAAGNSGSSGNRNTMGYPARYSSVIAVGAVSSNNTRASFSSVGSELEVMAPGVNILSTTPGNNYASFNGTSMAAPHVAGAAALIKAKYPSMTNVQIRERLKNTATNLGDPFFYGKGVINVESALQ

SEQ ID NO: 69649 - protein, 275 aa, Bacillus sp. LG1
AQTVPWGIPHIKADKAHAAGVTGSGVKVAILDTGIDANHADLNVKGGASFVSGEPNALQDGNGHGTHVAGTVAALNNTTGVLGVAYNADLYAVKVLSASGSGTLSGIAQGIEWSISNGMNVINMSLGGSSGSTALQQACNNAYNRGIVVIAAAGNSGSSGNRNTMGYPARYSSVIAVGAVSSNNTRASFSSVGSELEVMAPGVNILSTTPGNNYASFNGTSMAAPHVAGAAALIKAKYPSMTNVQIRERLKNTATNQGDPFFYGKGVINVESALQ

SEQ ID NO: 69650 - protein, 275 aa, Bacillus sp. LG1
AQTVPWGIPHIKADKAHAAGVTGSGVKVAILDTGIDANHADLNVKGGASFVSGEPNALQDGNGHGTHVAGTVAALNNTTGVLGVAYNADLYAVKVLSASGSGTLSGIAQGIEWSISNGMNVINMSLGGSSGSTALQQACNNAYNRGIVVIAAAGNSGSSGNRNTMGYPARYSSVIAVGAVSSNNTRASFSSVGSELEVMAPGVNILSTTPGNNYASFNGTSMAAPHVAGAAALIKAKYPSMTNVQIRERLKNTATNGGDPFFYGKGVINVESALQ

SEQ ID NO: 69651 - protein, 275 aa, Bacillus sp. LG1
AQTVPWGIPHIKADKAHAAGVTGSGVLVAILDTGIDANHADLNVKGGASFVSGEPNALQDGNGHGTHVAGTVAALNNTTGVLGVAYNADLYAVKVLSASGSGTLSGIAQGIEWSISNGMNVINMSLGGSSGSTALQQACNNAYNRGIVVIAAAGNSGSSGNRNTMGYPARYSSVIAVGAVSSNNTRASFSSVGSELEVMAPGVNILSTTPGNNYASFNGTSMAAPHVAGAAALIKAKYPSMTNVQIRERLKNTATNLGDPFFYGKGVINVESALQ

SEQ ID NO: 69652 - protein, 275 aa, Bacillus sp.
AQTVPWGIPHIKADKAHAAGVTGSGVKVAILDTGIDATHADLNVKGGASFVSGEPNALQDGNGHGTHVAGTVAALNNTTGVLGVAYNADLYAVKVLSASGSGTLSGIAQGIEWSISNGMNVINMSLGGSSGSTALQQACDNAYNRGIVVIAAAGNSGSDGNRNTMYYPARYSSVIAVGAVSSNNQRASFSSVGSELEVMAPGVNILSTTPGNNYASFNGTSMAAPHVAGAAALIKAKYPSMTNVQIRERLKNTATNLGDPFFYGKGVINVESALQ

SEQ ID NO: 69653 - protein, 275 aa, Bacillus sp. LG1
AQTVPWGIPHIKADKAHAAGVTGSGVKVAILDTGIDANHADLNVKGGASFVSGEPNALQDGNGHGTHVAGTVAALNNTTGVLGVAYNADLYAVKVLSASGSGTLSGIAQGIEWSISNGMNVINMSLGGSSGSTALQQACNNAYNRGIVVIAAAGNSGSSGNRNTMGYPARYSSVIAVGAVSSNNTRASFSSVGSELEVMAPGVNILSTTPGNNYASFNGTSMAAPHVAGAAALIKAKYVSMTNVQIRERLKNTATNLGDPFFYGKGVINVESALQ

SEQ ID NO: 69654 - protein, 275 aa, Bacillus sp. LG1
AQTVPWGIPHIKADKAHAAGVTGSGVKVAILDTGIDANHADLNVKGGASFVSGEPNALQDGNGHGTHVAGTVAALNNTTGVLGVAYNADLYAVKVLSASGSGTLSGIAQGIEWSISNGMNVINMSLGGSSGSTALQQACNNAYNRGIVVIAAAGNDGSSGNRNTMGYPARYSSVIAVGAVSSNNTRASFSSVGSELEVMAPGVNILSTTPGNNYASFNGTSMAAPHVAGAAALIKAKYPSMTNVQIRERLKNTATNLGDPFFYGKGVINVESALQ

SEQ ID NO: 69655 - protein, 275 aa, Bacillus sp. LG1
AQTVPWGIPHIKADKAHAAGVTGSGVKVAILDTGIDANHADLNVKGGASFVSGEPNALQDGNGHGTHVAGTVAALNNTTGVLGVAYNADLVAVKVLSASGSGTLSGIAQGIEWSISNGMNVINMSLGGSSGSTALQQACNNAYNRGIVVIAAAGNSGSSGNRNTMGYPARYSSVIAVGAVSSNNTRASFSSVGSELEVMAPGVNILSTTPGNNYASFNGTSMAAPHVAGAAALIKAKYPSMTNVQIRERLKNTATNLGDPFFYGKGVINVESALQ

SEQ ID NO: 69656 - protein, 275 aa, Bacillus sp. LG1
AQTVPWGIPHIKADKAHAAGVTGSGVKVAILDTGIDANHADLNVKGGASFVSGEPNALQDGNGHGTHVAGTVAALNNTTGVLGVAYNADLYAVKVLSASGSGTLSGIAQGIEWSISNGMNVINMSLGGSSGSTALQQACNNAYNRGIVVIAAAGNSGSSGNRNTMGYPARYSSVIAVGAVSSNNTRASFSSVGSELEVMAPGVNILSTTQGNNYASFNGTSMAAPHVAGAAALIKAKYPSMTNVQIRERLKNTATNLGDPFFYGKGVINVESALQ

SEQ ID NO: 69657 - protein, 275 aa, Bacillus sp. LG1
AQTVPWGIPHIKADKAHAAGVTGSGVKVAILDTGIDANHADLNVKGGASFVSGEPNALQDGNGHGTHVAGTVAALNNTTGVLGVAYNADLYAVKVLSASGSGTLSGIAQGIEWSISNGMNVINMSLGGSSGSNALQQACNNAYNRGIVVIAAAGNSGSSGNRNTMGYPARYSSVIAVGAVSSNNTRASFSSVGSELEVMAPGVNILSTTPGNNYASFNGTSMAAPHVAGAAALIKAKYPSMTNVQIRERLKNTATNLGDPFFYGKGVINVESALQ

SEQ ID NO: 69658 - protein, 275 aa, Bacillus sp. LG1
AQTVPWGIPHIKADKAHAAGVTGSGVKVAILDTGIDANHADLNVKGGHSFVSGEPNALQDGNGHGTHVAGTVAALNNTTGVLGVAYNADLYAVKVLSASGSGTLSGIAQGIEWSISNGMNVINMSLGGSSGSTALQQACNNAYNRGIVVIAAAGNSGSSGNRNTMGYPARYSSVIAVGAVSSNNTRASFSSVGSELEVMAPGVNILSTTPGNNYASFNGTSMAAPHVAGAAALIKAKYPSMTNVQIRERLKNTATNLGDPFFYGKGVINVESALQ

SEQ ID NO: 69659 - protein, 275 aa, Bacillus sp. LG1
AQTVPWGIPHIKADKAHAAGVTGSGVKVAILDTGIDDNHADLNVKGGASFVSGEPNALQDGNGHGTHVAGTVAALNNTTGVLGVAYNADLYAVKVLSASGSGTLSGIAQGIEWSISNGMNVINMSLGGSSGSTALQQACNNAYNRGIVVIAAAGNSGSSGNRNTMGYPARYSSVIAVGAVSSNNTRASFSSVGSELEVMAPGVNILSTTPGNNYASFNGTSMAAPHVAGAAALIKAKYPSMTNVQIRERLKNTATNLGDPFFYGKGVINVESALQ

SEQ ID NO: 69660 - protein, 275 aa, Bacillus sp. LG1
AQTVPWGIPHIKADKAHAAGVTGSGVKVAILDTGIDANHADLNVKGGASFVSGEPNALQDGNGHGTHVAGTVAALNNTTGVLGVAYNADLYAVKVLSASGSGTLSGIAQGIEWSISNGMNVINMSLGGSSGSTALQQACNNAYNRGIVVIAAAGNSGSSGNRNTMSYPARYSSVIAVGAVSSNNTRASFSSVGSELEVMAPGVNILSTTPGNNYASFNGTSMAAPHVAGAAALIKAKYPSMTNVQIRERLKNTATNLGDPFFYGKGVINVESALQ

SEQ ID NO: 69661 - protein, 275 aa, Bacillus sp. LG1
AQTVPWGIPHIKADKAHAAGVTGSGVKVAILDTGIDANHADLNVKGGASFVSGEPNALQDGNGHGTHVAGTVAALNNTTGVLGVAYNADLYAVKVLSASGSGTLSGIAQGIEWSISNGMNVINMSLGGSSGSTALQQACNNAYNRGIVVIAAAGNSGSSGNRNTMGYPARYSSVIAVGAVSSNNTRASFSSVGSELEVMAPGVNILSTTPGNNYFSFNGTSMAAPHVAGAAALIKAKYPSMTNVQIRERLKNTATNLGDPFFYGKGVINVESALQ

SEQ ID NO: 69662 - protein, 275 aa, Bacillus sp. LG1
AQTVPWGIPHIKADKAHAAGVTGSGVKVAILDTGIDANHADLNVKGGASFVSGEPNALQDGNGHGTFVAGTVAALNNTTGVLGVAYNADLYAVKVLSASGSGTLSGIAQGIEWSISNGMNVINMSLGGSSGSTALQQACNNAYNRGIVVIAAAGNSGSSGNRNTMGYPARYSSVIAVGAVSSNNTRASFSSVGSELEVMAPGVNILSTTPGNNYASFNGTSMAAPHVAGAAALIKAKYPSMTNVQIRERLKNTATNLGDPFFYGKGVINVESALQ

SEQ ID NO: 69663 - protein, 275 aa, Bacillus sp. LG1
AQTVPWGIPHIKADKAHAAGVTGSGVKVAILDTGIDANHADLNVKGGASFVSGEPNALQDGNGHGTHVAGTVAALNNTTGVLGVAYNADLYAVKVLSASGSGTLSGIAQGIEWSISNGMNVINMSLGGSSGSTALQQACNNAYNRGIVVIAAAGNSGSSGNRNTMGYPARYSTVIAVGAVSSNNTRASFSSVGSELEVMAPGVNILSTTPGNNYASFNGTSMAAPHVAGAAALIKAKYPSMTNVQIRERLKNTATNLGDPFFYGKGVINVESALQ

SEQ ID NO: 69664 - protein, 275 aa, Bacillus sp. LG1
AQTVPWGIPHIKADKAHAAGVTGSGVKVAILDTGIDANHADLNVKGGASFVSGEPNALQDGNGHGTHVAGTVAALNNTTGVLGVAYNADLYAVKVLSASGSGTLSGIAQGIEWSISNGMNVINMSLGGSSGSTALQQACNNAYNRGIVVIAAAGNSGSSGNRNTMGYPARYSSVIAVGAVSSNNTRASFSSVGSELEVMAPGVNILSTTPGNNYASFNGTSMAAPHVAGAAALQKAKYPSMTNVQIRERLKNTATNLGDPFFYGKGVINVESALQ

SEQ ID NO: 69665 - protein, 275 aa, Bacillus sp. LG1
AQTVPWGIPHIKADKAHAAGVTGSGVKVAILDTGIDANHADLNVKGGASFVSGEPNALQDGNGHGTHVAGTVAALNNTTGVLGVAYNADLYAVKVLSASGSGTLSGIAQGIEWSISNGMNVINMSLGGSSGSTALQQACNNAYNRGIVVIAAAGNSGSSGNRNTMGYPARYSSVIAVGAVSSNNTRASASSVGSELEVMAPGVNILSTTPGNNYASFNGTSMAAPHVAGAAALIKAKYPSMTNVQIRERLKNTATNLGDPFFYGKGVINVESALQ

SEQ ID NO: 69666 - protein, 275 aa, Bacillus sp. LG1
AQTVPWGIPHIKADKAHAAGVTGSGVKVAILDTGIDANHADLNVKGGASFNSGEPNALQDGNGHGTHVAGTVAALNNTTGVLGVAYNADLYAVKVLSASGSGTLSGIAQGIEWSISNGMNVINMSLGGSSGSTALQQACNNAYNRGIVVIAAAGNSGSSGNRNTMGYPARYSSVIAVGAVSSNNTRASFSSVGSELEVMAPGVNILSTTPGNNYASFNGTSMAAPHVAGAAALIKAKYPSMTNVQIRERLKNTATNLGDPFFYGKGVINVESALQ

SEQ ID NO: 69667 - protein, 275 aa, Bacillus sp. LG1
AQTVPWGIPHIKADKAHAAGVTGSGVKVAILDTGIDANHADLNVKGGASFVSGEPNALQDGNGHGTHVAGTVAALNNTTGVLGVAYNADLYAVKVLSASGSGTLSGIAQGIEWSISNGMNVINMSLGGSSGSTALQQACNNAYNRGIVVIAAAGNSGSSGNRNTMGYPARYSSVIAVGAVSSNNTRASFSSVGSELEVMAPGVNILSTTPGNNYASFNGTSMAAPHVAGAAALIKAKYCSMTNVQIRERLKNTATNLGDPFFYGKGVINVESALQ

SEQ ID NO: 69668 - protein, 275 aa, Bacillus sp. LG1
AQTVPWGIPHIKADKAHAAGVTGSGVKVAILDTGIDANHADLNVKGGASFVSGEPNALQDGNGHGTHVAGNVAALNNTTGVLGVAYNADLYAVKVLSASGSGTLSGIAQGIEWSISNGMNVINMSLGGSSGSTALQQACNNAYNRGIVVIAAAGNSGSSGNRNTMGYPARYSSVIAVGAVSSNNTRASFSSVGSELEVMAPGVNILSTTPGNNYASFNGTSMAAPHVAGAAALIKAKYPSMTNVQIRERLKNTATNLGDPFFYGKGVINVESALQ

SEQ ID NO: 69669 - protein, 275 aa, Bacillus sp. LG1
AQTVPWGIPHIKADKAHAAGVTGSGVKVAILDTGIDANHADLNVKGGASFVSGEPNALQDGNGHGTHVAGTVAALNNTTGVLGVAYNADLYAVKVLSASGSGTLSGIAQGIEWSISNGMNVINMSLGGSSGSTALQQACNNAYNRGIVVIAAAGNSGSSGNRNTMGYPARYSSVIAVGAVSSNNTRASFSSVGSELEVMAPGVNILSTTPGNNYASFNGTSMAAPHVAGAAALIKAKYPSMTNVMIRERLKNTATNLGDPFFYGKGVINVESALQ

SEQ ID NO: 69670 - protein, 275 aa, Bacillus sp. LG1
AQTVPWGIPHIKADKAHAAGVTGSGVKVAILDTGIDANHADLNVKGGASFVSGEPNALQDGNGHGTHVAGTVAALNNTTGVLGVAYNADFYAVKVLSASGSGTLSGIAQGIEWSISNGMNVINMSLGGSSGSTALQQACNNAYNRGIVVIAAAGNSGSSGNRNTMGYPARYSSVIAVGAVSSNNTRASFSSVGSELEVMAPGVNILSTTPGNNYASFNGTSMAAPHVAGAAALIKAKYPSMTNVQIRERLKNTATNLGDPFFYGKGVINVESALQ

SEQ ID NO: 69671 - protein, 275 aa, Bacillus sp. LG1
AQTVPWGIPHIKADKAHAAGVTGSGVKVAILDTGIDANHADLNVKGGAKFVSGEPNALQDGNGHGTHVAGTVAALNNTTGVLGVAYNADLYAVKVLSASGSGTLSGIAQGIEWSISNGMNVINMSLGGSSGSTALQQACNNAYNRGIVVIAAAGNSGSSGNRNTMGYPARYSSVIAVGAVSSNNTRASFSSVGSELEVMAPGVNILSTTPGNNYASFNGTSMAAPHVAGAAALIKAKYPSMTNVQIRERLKNTATNLGDPFFYGKGVINVESALQ

SEQ ID NO: 69672 - protein, 275 aa, Bacillus sp. LG1
AQTVPWGIPHIKADKAHAAGVTGSGVKVAILDTGIDANHADLNVKGGASFVSGEPNALQDGNGHGTHVAGTVAALNNTQGVLGVAYNADLYAVKVLSASGSGTLSGIAQGIEWSISNGMNVINMSLGGSSGSTALQQACNNAYNRGIVVIAAAGNSGSSGNRNTMGYPARYSSVIAVGAVSSNNTRASFSSVGSELEVMAPGVNILSTTPGNNYASFNGTSMAAPHVAGAAALIKAKYPSMTNVQIRERLKNTATNLGDPFFYGKGVINVESALQ

SEQ ID NO: 69673 - protein, 275 aa, Bacillus sp. LG1
AQTVPWGIPHIKADKAHAAGVTGSGVKVAILDTGIDANHADLNVKGGASFVSGEPNALQDGNGHGTHVAGTVAALNNTTGVLGVAYNADLYAVKVLSASGSGTLSGIAQGIEWSISNGMNVINMSLGGSSGSTALQQACNNAYNRGIVVIAAAGNSGSSGNRNTMGYPARYSSVIAVGAVSSNNTRHSFSSVGSELEVMAPGVNILSTTPGNNYASFNGTSMAAPHVAGAAALIKAKYPSMTNVQIRERLKNTATNLGDPFFYGKGVINVESALQ

SEQ ID NO: 69674 - protein, 275 aa, Bacillus sp. LG1
AQTVPWGIPHIKADKAHAAGVTGSGVKVAILDTGIDANHADLNVKGGDSFVSGEPNALQDGNGHGTHVAGTVAALNNTTGVLGVAYNADLYAVKVLSASGSGTLSGIAQGIEWSISNGMNVINMSLGGSSGSTALQQACNNAYNRGIVVIAAAGNSGSSGNRNTMGYPARYSSVIAVGAVSSNNTRASFSSVGSELEVMAPGVNILSTTPGNNYASFNGTSMAAPHVAGAAALIKAKYPSMTNVQIRERLKNTATNLGDPFFYGKGVINVESALQ

SEQ ID NO: 69675 - protein, 275 aa, Bacillus sp. LG1
AQTVPWGIPHIKADKAHAAGVTGSGVKVAILDTGIDANHADLNVKGGASFVSGEPNALQDGNGHGTHVAGTVAALNNTTGVLGVAYNADLYAVKVLSASGSGTLSGIAQGIEWSISNGMNVINMSLGGSSGSTALQQACNNAYNRGIVVIAAAGNHGSSGNRNTMGYPARYSSVIAVGAVSSNNTRASFSSVGSELEVMAPGVNILSTTPGNNYASFNGTSMAAPHVAGAAALIKAKYPSMTNVQIRERLKNTATNLGDPFFYGKGVINVESALQ

SEQ ID NO: 69676 - protein, 275 aa, Bacillus sp. LG1
AQTVPWGIPHIKADKAHAAGVTGSGVEVAILDTGIDANHADLNVKGGASFVSGEPNALQDGNGHGTHVAGTVAALNNTTGVLGVAYNADLYAVKVLSASGSGTLSGIAQGIEWSISNGMNVINMSLGGSSGSTALQQACNNAYNRGIVVIAAAGNSGSSGNRNTMGYPARYSSVIAVGAVSSNNTRASFSSVGSELEVMAPGVNILSTTPGNNYASFNGTSMAAPHVAGAAALIKAKYPSMTNVQIRERLKNTATNLGDPFFYGKGVINVESALQ

SEQ ID NO: 69677 - protein, 275 aa, Bacillus sp. LG1
AQTVPWGIPHIKADKAHAAGVTGSGVKVAILDTGIDANHADLNVKGGASFVSGEPNALQDGNGHGTHVAGTVAALNNRTGVLGVAYNADLYAVKVLSASGSGTLSGIAQGIEWSISNGMNVINMSLGGSSGSTALQQACNNAYNRGIVVIAAAGNSGSSGNRNTMGYPARYSSVIAVGAVSSNNTRASFSSVGSELEVMAPGVNILSTTPGNNYASFNGTSMAAPHVAGAAALIKAKYPSMTNVQIRERLKNTATNLGDPFFYGKGVINVESALQ

SEQ ID NO: 69678 - protein, 275 aa, Bacillus sp. LG1
AQTVPWGIPHIKADKAHAAGVTGSGVKVAILDTGIDANHADLNVKGGASFVSGEPNALQDGNGHGTHVAGTVAALNNTTGVLGVAYNADLYAVKVLSASGSGTLSGIAQGIEWSISNGMNVINMSLGGSSGSTALQQACNNAYNNGIVVIAAAGNSGSSGNRNTMGYPARYSSVIAVGAVSSNNTRASFSSVGSELEVMAPGVNILSTTPGNNYASFNGTSMAAPHVAGAAALIKAKYPSMTNVQIRERLKNTATNLGDPFFYGKGVINVESALQ

SEQ ID NO: 69679 - protein, 275 aa, Bacillus sp. LG1
AQTVPWGIPHIKADKAHAAGVTGSGVKVAILDTGIDANHADLNVKGGASFVSGEPNALQDGNGHGTHVAGTVAALNNTTGVLGVAYNADLYAVKVLSASGSGTLSGIAQGIEWSISNGMNVINMSLGGSSGSTALQQACNNAYNRGIVVIAAAGNSGSSGNRNTMGYPARYSSVIAVGAVSSNNTRASFSSVGSELEVMAPGVNILSTTEGNNYASFNGTSMAAPHVAGAAALIKAKYPSMTNVQIRERLKNTATNLGDPFFYGKGVINVESALQ

SEQ ID NO: 69680 - protein, 275 aa, Bacillus sp. LG1
AQTVPWGIPHIKADKAHAAGVTGSGVKVAILDTGIDANHADLNVKGGASFVSGEPNALQDGNGHGTHVAGTVAGLNNTTGVLGVAYNADLYAVKVLSASGSGTLSGIAQGIEWSISNGMNVINMSLGGSSGSTALQQACNNAYNRGIVVIAAAGNSGSSGNRNTMGYPARYSSVIAVGAVSSNNTRASFSSVGSELEVMAPGVNILSTTPGNNYASFNGTSMAAPHVAGAAALIKAKYPSMTNVQIRERLKNTATNLGDPFFYGKGVINVESALQ

SEQ ID NO: 69681 - protein, 275 aa, Bacillus sp. LG1
AQTVPWGIPHIKADKAHAAGVTGSGVKVAILDTGIDANHADLNVKGGASFVSGEPNALQDGNGHGTHVAGTVAALNNTTGVLGVAYNADLYAVKVLSASGSGTLSGIAQGIEWSISNGMNVINMSLGGSSGSTALQQACNNAYNRGIVVIAAAGNSGSSGNRNTMGYPARYSSVIAVGAVSYNNTRASFSSVGSELEVMAPGVNILSTTPGNNYASFNGTSMAAPHVAGAAALIKAKYPSMTNVQIRERLKNTATNLGDPFFYGKGVINVESALQ

SEQ ID NO: 69682 - protein, 275 aa, Bacillus sp. LG1
AQTVPWGIPHIKADKAHAAGVTGSGVKVAILDTGIDANHADLNVKGGASFVSGEPNALQDGNGHGTHVAGTVAADNNTTGVLGVAYNADLYAVKVLSASGSGTLSGIAQGIEWSISNGMNVINMSLGGSSGSTALQQACNNAYNRGIVVIAAAGNSGSSGNRNTMGYPARYSSVIAVGAVSSNNTRASFSSVGSELEVMAPGVNILSTTPGNNYASFNGTSMAAPHVAGAAALIKAKYPSMTNVQIRERLKNTATNLGDPFFYGKGVINVESALQ

SEQ ID NO: 69683 - protein, 275 aa, Bacillus sp. LG1
AQTVPWGIPHIKADKAHAAGVTGSGVKVAILDTGIDANHADLNVKGGASFVSGEPNALQDGNGHGTHVAGTVAALNNTTGVLGVAYNADLYAVKVLSASGSGTLSGIAQGIEWSISNGMNVINMSLGGSSGSTALQQACNNAYNRGIVVIAAAGNSGSSGNRNTMGDPARYSSVIAVGAVSSNNTRASFSSVGSELEVMAPGVNILSTTPGNNYASFNGTSMAAPHVAGAAALIKAKYPSMTNVQIRERLKNTATNLGDPFFYGKGVINVESALQ

SEQ ID NO: 69684 - protein, 275 aa, Bacillus sp. LG1
AQTVPWGIPHIKADKAHAAGVTGSGVKVAILDTGIDANHADLNVKGGASFVSGEPNALQDGNGHGTHVAGVVAALNNTTGVLGVAYNADLYAVKVLSASGSGTLSGIAQGIEWSISNGMNVINMSLGGSSGSTALQQACNNAYNRGIVVIAAAGNSGSSGNRNTMGYPARYSSVIAVGAVSSNNTRASFSSVGSELEVMAPGVNILSTTPGNNYASFNGTSMAAPHVAGAAALIKAKYPSMTNVQIRERLKNTATNLGDPFFYGKGVINVESALQ

SEQ ID NO: 69685 - protein, 275 aa, Bacillus sp. LG1
AQTVPWGIPHIKADKAHAAGVTGSGVKVAILDTGIDANTADLNVKGGASFVSGEPNALQDGNGHGTHVAGTVAALNNTTGVLGVAYNADLYAVKVLSASGSGTLSGIAQGIEWSISNGMNVINMSLGGSSGSTALQQACNNAYNRGIVVIAAAGNSGSSGNRNTMGYPARYSSVIAVGAVSSNNTRASFSSVGSELEVMAPGVNILSTTPGNNYASFNGTSMAAPHVAGAAALIKAKYPSMTNVQIRERLKNTATNLGDPFFYGKGVINVESALQ

SEQ ID NO: 69686 - protein, 275 aa, Bacillus sp. LG1
AQTVPWGIPHIKADKAHAAGVTGSGVKVAILDTGFDANHADLNVKGGASFVSGEPNALQDGNGHGTHVAGTVAALNNTTGVLGVAYNADLYAVKVLSASGSGTLSGIAQGIEWSISNGMNVINMSLGGSSGSTALQQACNNAYNRGIVVIAAAGNSGSSGNRNTMGYPARYSSVIAVGAVSSNNTRASFSSVGSELEVMAPGVNILSTTPGNNYASFNGTSMAAPHVAGAAALIKAKYPSMTNVQIRERLKNTATNLGDPFFYGKGVINVESALQ

SEQ ID NO: 69687 - protein, 275 aa, Bacillus sp. LG1
AQTVPWGIPHIKADKAHAAGVTGSGVKVAILDTGIDANHADLNVKGGASFVSGEPNALQDGNGHGTHVAGTVAALNNTTGVLGVAYNADLYAVKVLSASGSGTLSGIAQGIEWSISNGMNVINMSLGGSSGSTALQQACNNAYNRGIVVIAAAGNSGSSGNRNTMGYPARYSSVIAVGAVSSNNTRASFSSVGSELEVMAPGVNILSITPGNNYASFNGTSMAAPHVAGAAALIKAKYPSMTNVQIRERLKNTATNLGDPFFYGKGVINVESALQ

SEQ ID NO: 69688 - protein, 275 aa, Bacillus sp. LG1
AQTVPWGYPHIKADKAHAAGVTGSGVKVAILDTGIDANHADLNVKGGASFVSGEPNALQDGNGHGTHVAGTVAALNNTTGVLGVAYNADLYAVKVLSASGSGTLSGIAQGIEWSISNGMNVINMSLGGSSGSTALQQACNNAYNRGIVVIAAAGNSGSSGNRNTMGYPARYSSVIAVGAVSSNNTRASFSSVGSELEVMAPGVNILSTTPGNNYASFNGTSMAAPHVAGAAALIKAKYPSMTNVQIRERLKNTATNLGDPFFYGKGVINVESALQ

SEQ ID NO: 69689 - protein, 275 aa, Bacillus sp. LG1
AQTVPWGIPHIKADKAHAAGVTGSGVKVAILDTGIDANHADLNVKGGASFVSGEPNALQDGNGHGTHVAGTVAALNNTTGVLGVAYNADLYAVKVLSASGSGTLSGIAQGIEWSISNGMNVINMSLGGSSGSTALQQACNNAYNRGIVVIAAAGNSGSSGNRNTMEYPARYSSVIAVGAVSSNNTRASFSSVGSELEVMAPGVNILSTTPGNNYASFNGTSMAAPHVAGAAALIKAKYPSMTNVQIRERLKNTATNLGDPFFYGKGVINVESALQ

SEQ ID NO: 69690 - protein, 275 aa, Bacillus sp. LG1
AQTVPWGIPHIKADKAHAAGVTGSGVKVAILDTGIDANHADLNVKGGASFVSGEPNALQDGNGHGTHVAGTVAALNNTTGVLGVAYNADLYAVKSLSASGSGTLSGIAQGIEWSISNGMNVINMSLGGSSGSTALQQACNNAYNRGIVVIAAAGNSGSSGNRNTMGYPARYSSVIAVGAVSSNNTRASFSSVGSELEVMAPGVNILSTTPGNNYASFNGTSMAAPHVAGAAALIKAKYPSMTNVQIRERLKNTATNLGDPFFYGKGVINVESALQ

SEQ ID NO: 69691 - protein, 275 aa, Bacillus sp. LG1
AQTVPWGIPHIKADKAHAAGVTGSGVKHAILDTGIDANHADLNVKGGASFVSGEPNALQDGNGHGTHVAGTVAALNNTTGVLGVAYNADLYAVKVLSASGSGTLSGIAQGIEWSISNGMNVINMSLGGSSGSTALQQACNNAYNRGIVVIAAAGNSGSSGNRNTMGYPARYSSVIAVGAVSSNNTRASFSSVGSELEVMAPGVNILSTTPGNNYASFNGTSMAAPHVAGAAALIKAKYPSMTNVQIRERLKNTATNLGDPFFYGKGVINVESALQ

SEQ ID NO: 69692 - protein, 275 aa, Bacillus sp. LG1
AQTVPWGIPHIKADKAHAAGVTGSGVKVAILDTGIDANHADLNVKGGASFVSGEPNALQDGNGHGTHVAGTVAALNNTTGVLGVAYNADLYAGKVLSASGSGTLSGIAQGIEWSISNGMNVINMSLGGSSGSTALQQACNNAYNRGIVVIAAAGNSGSSGNRNTMGYPARYSSVIAVGAVSSNNTRASFSSVGSELEVMAPGVNILSTTPGNNYASFNGTSMAAPHVAGAAALIKAKYPSMTNVQIRERLKNTATNLGDPFFYGKGVINVESALQ

SEQ ID NO: 69693 - protein, 275 aa, Bacillus sp. LG1
AQTVPWGIPHIKADKAHAAGVTGSGVKVAILDTGIDANHADLNVKGGASFVSGEPNALQDGNGHGTHVAGTVAALNNTTGVLGVAYNADLYAVKVLSASGSGTLSGIAQGIEWSISNGMNVINMSLGGSSGSTALQQACNNAYNRGIVVIAAAGNSGSSGNRNTMGYPARYSSVIAVGAVSSNNTRASFSSVGSELEVMAPGVNILSTTPGNNYASFNGTSMAAPHVAGAAALIKAKYPSMTNVLIRERLKNTATNLGDPFFYGKGVINVESALQ

SEQ ID NO: 69694 - protein, 275 aa, Bacillus sp. LG1
AQTVPWGIPHIKADKAHAAGVTGSGVKVAILDTGIDANHADLNVKGGASFVSGEPNALQDGNGHGTHVAGTVAALNNTTGVLGVAYNADLYAVKVLSASGSGTLSGIAQGIEWSISNGMNVINMSLGGSSGSTALQQACNNAYNRGIVVIAAAGNSGSSGNRNTMGYPARYSSVIAVGAVSSNNTRASFSSVGSELEVMAPGVNILSTTPGNNYASFNGTSMAAPHVAGFAALIKAKYPSMTNVQIRERLKNTATNLGDPFFYGKGVINVESALQ

SEQ ID NO: 69695 - protein, 275 aa, Bacillus sp.
AQTVPWGIPHIKADKAHAAGVTGSGVKVAILDTGIDANHADLNVKGGASFVSGEPNALQDGNGHGTHVAGTVAALDNTTGVLGVAYNADLYAVKVLSASGSGTLSGIAQGIEWSISNRMNVINMSLGHPSGSTALQQACNNAYNRGIVVIAAAGNSGSSGNRNTMDYPARYSSVIAVGAVSSNNTRASFSSVGSELEVMAPGVNILSTTPGNNYASFNGTSMAAPHVAGAAALIKAKYPSMTNVQIRNRLKNTATNLGDPFFYGKGVINVESALQ

SEQ ID NO: 69696 - protein, 275 aa, Bacillus sp. LG1
AQTVPWGIPHIKADKAHAAGVTGSGVKVAILDTGIDANHADLNVKGGASFVSGEPNALQDGNGHGTHVAGTVAALNNTTGVLGVAYNADLYAVKVLSASGSGTLSGIAQGIEWSISNGMNVINMSLGGSSGSTALQQACNNAYNRGIVVIAAAGNSGSSGNRNTMGYPARYSSVIAVGAVSSNNTRASPSSVGSELEVMAPGVNILSTTPGNNYASFNGTSMAAPHVAGAAALIKAKYPSMTNVQIRERLKNTATNLGDPFFYGKGVINVESALQ

SEQ ID NO: 69697 - protein, 275 aa, Bacillus sp. LG1
AQTVPWGIPHIKADKAHAAGVTGSGVKVAILDTGIDANHADLNVKGGASFVSGEPNALQDGNGHGTAVAGTVAALNNTTGVLGVAYNADLYAVKVLSASGSGTLSGIAQGIEWSISNGMNVINMSLGGSSGSTALQQACNNAYNRGIVVIAAAGNSGSSGNRNTMGYPARYSSVIAVGAVSSNNTRASFSSVGSELEVMAPGVNILSTTPGNNYASFNGTSMAAPHVAGAAALIKAKYPSMTNVQIRERLKNTATNLGDPFFYGKGVINVESALQ

SEQ ID NO: 69698 - protein, 275 aa, Bacillus sp. LG1
AQTVPWGIPHIKADKAHAAGVTGSGVKVAILDTGIDANHADLNVKGGASFVSGEPNALQDGNGHGTHVAGTVAALNNTTGVLGVAYNADLYAVKVLSASGSGTLSGIAQGIEWSISNGMNVINMSLGGSSGSTALQQACNNAYNRGIVPIAAAGNSGSSGNRNTMGYPARYSSVIAVGAVSSNNTRASFSSVGSELEVMAPGVNILSTTPGNNYASFNGTSMAAPHVAGAAALIKAKYPSMTNVQIRERLKNTATNLGDPFFYGKGVINVESALQ

SEQ ID NO: 69699 - protein, 275 aa, Bacillus sp. LG1
AQTVPWGIPHIKADKAHAAGVTGSGVKVAILDTGIDANHADLNVKGGASFVSGEPNALQDGNGHGTHVAGTVAALNNTTGVLGVAYNADLYAVKVLSASGSGTLSGIAQGIEWSISNGMNVINMSLGGSSGSTALQQACNNAYNRGIVVIAAAGNSGSSHNRNTMGYPARYSSVIAVGAVSSNNTRASFSSVGSELEVMAPGVNILSTTPGNNYASFNGTSMAAPHVAGAAALIKAKYPSMTNVQIRERLKNTATNLGDPFFYGKGVINVESALQ

SEQ ID NO: 69700 - protein, 275 aa, Bacillus sp. LG1
AQTVPWGIPHIKADKAHAAGVTGSGVKVAILDTGIDANHADLNVKGGASFVSGEPNALQDGNGHGTHVAGTVAALNNTTGVLGVAYNADLYAVKVLSASGSGTLSIIAQGIEWSISNGMNVINMSLGGSSGSTALQQACNNAYNRGIVVIAAAGNSGSSGNRNTMGYPARYSSVIAVGAVSSNNTRASFSSVGSELEVMAPGVNILSTTPGNNYASFNGTSMAAPHVAGAAALIKAKYPSMTNVQIRERLKNTATNLGDPFFYGKGVINVESALQ

SEQ ID NO: 69701 - protein, 275 aa, Bacillus sp. LG1
AQTVPWGIPHIKADKAHAAGVTGSGVKVAILDTGIDANHADLNVKGGASFVSGEPNALQDGNGHGTHVAGTVAALNNTTGVLGVAYNADLYAVKVLSASGSGTLSGIAQGIEWSISNGMNVIQMSLGGSSGSTALQQACNNAYNRGIVVIAAAGNSGSSGNRNTMGYPARYSSVIAVGAVSSNNTRASFSSVGSELEVMAPGVNILSTTPGNNYASFNGTSMAAPHVAGAAALIKAKYPSMTNVQIRERLKNTATNLGDPFFYGKGVINVESALQ

SEQ ID NO: 69702 - protein, 275 aa, Bacillus sp. LG1
AQTVPWGIPHIKADKAHAAGVTGSGVKVAILDTGIDANHADLNVKGGASFVSGEPNALQDGNGHGTHVAGTVAALNNTTGVLGVAYNADLYAVKVLSASGSGTLSGIAQGIEWSISNGMNVINMSLGGSSGSTALQQACNNAYNRGIVVIAAAGNSGSSGNRNTMGYPARYSSVIAVGAVSSNNTRASFSSVGSELEVMAPGVNILSTTPGNNYASFNGTSMAAPHVAGAAAHIKAKYPSMTNVQIRERLKNTATNLGDPFFYGKGVINVESALQ

SEQ ID NO: 69703 - protein, 275 aa, Bacillus sp. LG1
AQTVPWGIPHIKADKAHAAGVTGSGVKVAILDTGIDANHADLNVKGGASFVSGEPNALQDGNGHGTHVAGTVAALNNTTGVLGVAYNADLYAVKVLSASGSGTLSGIAQGIEWSISNGMNVINMSLGGSSGSTALQQACNNAYNRGIVVIAAAGNSGSSGNRNTMGYPARYSSVIAVGAVSSNNTRASFSSVGSELEVMAPGVNILSTTPGNNYASFNGTSMAAPHVAGAAALIKAKYPSMTNVQIRERLKNFATNLGDPFFYGKGVINVESALQ

SEQ ID NO: 69704 - protein, 275 aa, Bacillus sp. LG1
AQTVPWGIPHIKADKAHAAGVTGSGVKVAILDTGIDANHADLNVKGGASFVSGEPNALQDGNGHGTHVAGTVAALNNTTGVLGVAYNADLYAVKVLSASGSGTLSGIAQGIEWSISNGMNVINMSLGGSSGSTALQQACNNAYNRGIVVIAAAGNSGSSGNRNTMGYPARYSSVIAVGAVSSNNTRASFSSVGSELEVMAPGVNILSTTPGNNYASFNGTSMAAPHVAGAAALIKAKYPSMTNVQIRERLKNTATNLGDPFFYGKGVINVYSALQ

SEQ ID NO: 69705 - protein, 275 aa, Bacillus amyloliquefaciens
AQSVPYGVSQIKAPALHSQGYTGSNVKVAVIDSGIDSSHPDLKVAGGASMVPSETNPFQDNNGHGTHVAGTVAALNNSIGVLGVAPSASLYAVKVLGADGSGQYSWIINGIEWAIANNMDVINMSLGGPSGSAALKAAVDKAVASGVVVVAAAGNEGTSGSSSTVGYPGKYPSVIAVGAVDSSNQRASFSSVGPELDVMAPGVSIQSTWPGNKYAALNGTSMASPHVAGAAALILSKHPNWTNTQVRSSLENTTTKLGDSFYYGKGLINVQAAAQ

SEQ ID NO: 69706 - protein, 275 aa, Bacillus sp. LG1
AQTVPWGIPHIKADKAHAAGVTGSGVKVAILDTGIDANHADLNVKGGASFVSGEPNALQDGNGHGTHVAGTVAALNNTTGVLGVAYNADLYAVKVLSASGSGTLSGIAQGIEWSISNGMNVINMSLGGSSGSTALQQACNNAYNRGIVVIAAAGNSGSSGNRNTMGYPARYSSVIAVGAVSSNNTRASFSSVGSELEVMAPGVNILSTTPGNNYASFNGTSMAAPHVAGAAALIKAKYPSMTNVQIRERLKNGATNLGDPFFYGKGVINVESALQ

SEQ ID NO: 69707 - protein, 275 aa, Bacillus sp. LG1
AQTVPWGIPHIKADKAHAAGVTGSGVKVAILDTGIDANHADLNVKGGASFVSGEPNALQDGNLHGTHVAGTVAALNNTTGVLGVAYNADLYAVKVLSASGSGTLSGIAQGIEWSISNGMNVINMSLGGSSGSTALQQACNNAYNRGIVVIAAAGNSGSSGNRNTMGYPARYSSVIAVGAVSSNNTRASFSSVGSELEVMAPGVNILSTTPGNNYASFNGTSMAAPHVAGAAALIKAKYPSMTNVQIRERLKNTATNLGDPFFYGKGVINVESALQ

SEQ ID NO: 69708 - protein, 275 aa, Bacillus subtilis
AQTTPWGITHINAHKAHSSSVTGSGVKVAVLDTGIDASHEDLNVKGGASFISGEPNALVDTNGHGTHVSGTVAALNNTIGVVGVAYNADLYAVKVLSASGSGTLSGIAQGVEWAIANNMDVINMSLGGSSGSTALKQAVDNAYASGIVVVAAAGNSGTRGRQNTMQYPARYSSVIAVGAVDSNNNRASFSSVGAELEVMAPGVSVLSTVPGGGYASYSGTSMASPHVAGAAALIKAKYPSLSASQIRDRLRNTATYLGDPFYYGNGVINVERALQ

SEQ ID NO: 69709 - protein, 275 aa, Synthetic construct
AQVVPWGIPHIKADKAHASGVTGSGVKVAVLDTGIDANHADLNVKGGASFVSGEPNALQDGNGHGTHVAGTVAALDNTTGVLGVAYNAFLYAVKVLGASGSGTLSGIAQGIEWSIANDMDVINMSLGISTGSTALQQACNNAYASGIVVVAAAGNSGSNGKRNTMGYPARYSSVIAVGAVDSSNNRASFSSVGSELEVMAPGVSILSTTPGNNYESFNGTSMASPHVAGAAALIKAKYPSMTNVQIRNKLKNTATNLGDAFYYGHGVINVEKALQ

SEQ ID NO: 69710 - protein, 275 aa, Bacillus sp. LG1
AQTVPWGIPHIKADKAHAAGVTGSGVKVAILDTGIDANHADLNVKGGASFVSGEPNALQDGNGHGTHVAGTVAALNNTTGVLGVAYNADLYAVKVLSASGSGTLSGIAQGIEWSISNGMNVINMSLGGSSGSTALQQACNNAYNRGIVVIAAAGNSGSSGNRNTMGYPARYSSVIAVGAVSSNNTRASFSSVGSELEVMAPGVNILSTTPGNNYASFNGGSMAAPHVAGAAALIKAKYPSMTNVQIRERLKNTATNLGDPFFYGKGVINVESALQ

SEQ ID NO: 69711 - protein, 275 aa, Bacillus sp. LG1
AQTVPWGIPHIKADKAHAAGVTGSGVKVAILDTGIDANHADLNVKGGASFVSGEPNALQDGNGHGTHVAGTVAALNNTTGVLGVAYNADLYAVKVLSASGSGTLSGIAQGIEWSISNGMNVINMSLGGSSGSTALQHACNNAYNRGIVVIAAAGNSGSSGNRNTMGYPARYSSVIAVGAVSSNNTRASFSSVGSELEVMAPGVNILSTTPGNNYASFNGTSMAAPHVAGAAALIKAKYPSMTNVQIRERLKNTATNLGDPFFYGKGVINVESALQ

SEQ ID NO: 69712 - protein, 275 aa, Bacillus sp. LG1
ARTVPWGIPHIKADKAHAAGVTGSGVKVAILDTGIDANHADLNVKGGASFVSGEPNALQDGNGHGTHVAGTVAALNNTTGVLGVAYNADLYAVKVLSASGSGTLSGIAQGIEWSISNGMNVINMSLGGSSGSTALQQACNNAYNRGIVVIAAAGNSGSSGNRNTMGYPARYSSVIAVGAVSSNNTRASFSSVGSELEVMAPGVNILSTTPGNNYASFNGTSMAAPHVAGAAALIKAKYPSMTNVQIRERLKNTATNLGDPFFYGKGVINVESALQ

SEQ ID NO: 69713 - protein, 275 aa, Bacillus sp. LG1
AQTVPWGIPHIKADKAHAANVTGSGVKVAILDTGIDANHADLNVKGGASFVSGEPNALQDGNGHGTHVAGTVAALNNTTGVLGVAYNADLYAVKVLSASGSGTLSGIAQGIEWSISNGMNVINMSLGGSSGSTALQQACNNAYNRGIVVIAAAGNSGSSGNRNTMGYPARYSSVIAVGAVSSNNTRASFSSVGSELEVMAPGVNILSTTPGNNYASFNGTSMAAPHVAGAAALIKAKYPSMTNVQIRERLKNTATNLGDPFFYGKGVINVESALQ

SEQ ID NO: 69714 - protein, 275 aa, Bacillus sp. LG1
AQTVPWGIPHIKADKAHAAGVTGSGVKVAILDTGIDANHADLNVKGGASFVSGEPNALQDGNGHGTHVAGTVAALNNTTGVLGVAYNADLYAIKVLSASGSGTLSGIAQGIEWSISNGMNVINMSLGGSSGSTALQQACNNAYNRGIVVIAAAGNSGSSGNRNTMGYPARYSSVIAVGAVSSNNTRASFSSVGSELEVMAPGVNILSTTPGNNYASFNGTSMAAPHVAGAAALIKAKYPSMTNVQIRERLKNTATNLGDPFFYGKGVINVESALQ

SEQ ID NO: 69715 - protein, 275 aa, Bacillus sp. LG1
AQTVPWGIPHIKADKAHAAGVTGSGVKVAILDTGIDANHADLNVKGGASFVSGEPNALQDGNGHGTHVAGTVAALNNTTGVLGVAYNADLYAVKVLSASGSGTLSGIAQGIEWSISNGMNVINMSLGGSSGSTALQQACNNAYNRGIVVIAAAGNSGSSGNRNTMGYPARYSSVIAVGAVSSNNTRASFSSVGSELEVMAPGVNILSTTPGNNYASFNGTSMAAPHVAGASALIKAKYPSMTNVQIRERLKNTATNLGDPFFYGKGVINVESALQ

SEQ ID NO: 69716 - protein, 275 aa, Bacillus sp. LG1
AQTVPWGIPHIKADSAHAAGVTGSGVKVAILDTGIDANHADLNVKGGASFVSGEPNALQDGNGHGTHVAGTVAALNNTTGVLGVAYNADLYAVKVLSASGSGTLSGIAQGIEWSISNGMNVINMSLGGSSGSTALQQACNNAYNRGIVVIAAAGNSGSSGNRNTMGYPARYSSVIAVGAVSSNNTRASFSSVGSELEVMAPGVNILSTTPGNNYASFNGTSMAAPHVAGAAALIKAKYPSMTNVQIRERLKNTATNLGDPFFYGKGVINVESALQ

SEQ ID NO: 69717 - protein, 275 aa, Bacillus sp. LG1
AQTVPWGIPHIKADKAHAAGVTGSGVKVAILDTGIDANHADLNVKGGASFVSGEPNALQDGNGHGTHVAGTVAALNNTTGVLGVAYNADLYAVKVLSASGSGTLSGIAQGIEWSISNGMNVINMSLGGSSGSTALQQACNNAYNRGIVVIAAAGNSGSSGNRNTMGYPARYSSVIAVGAVSSNNTRASFSSVGSELEVMAPGVNILSTTPGNNYASFNGTSMAAPHVAGAAALIKAKYWSMTNVQIRERLKNTATNLGDPFFYGKGVINVESALQ

SEQ ID NO: 69718 - protein, 275 aa, Bacillus sp. LG1
AQTVPWGIHHIKADKAHAAGVTGSGVKVAILDTGIDANHADLNVKGGASFVSGEPNALQDGNGHGTHVAGTVAALNNTTGVLGVAYNADLYAVKVLSASGSGTLSGIAQGIEWSISNGMNVINMSLGGSSGSTALQQACNNAYNRGIVVIAAAGNSGSSGNRNTMGYPARYSSVIAVGAVSSNNTRASFSSVGSELEVMAPGVNILSTTPGNNYASFNGTSMAAPHVAGAAALIKAKYPSMTNVQIRERLKNTATNLGDPFFYGKGVINVESALQ

SEQ ID NO: 69719 - protein, 275 aa, Bacillus sp. LG1
AQTVPWGIPHIKADKAHAAGVTGSGVKVAILDTGIDANHADLNVKGGASFVSGTPNALQDGNGHGTHVAGTVAALNNTTGVLGVAYNADLYAVKVLSASGSGTLSGIAQGIEWSISNGMNVINMSLGGSSGSTALQQACNNAYNRGIVVIAAAGNSGSSGNRNTMGYPARYSSVIAVGAVSSNNTRASFSSVGSELEVMAPGVNILSTTPGNNYASFNGTSMAAPHVAGAAALIKAKYPSMTNVQIRERLKNTATNLGDPFFYGKGVINVESALQ

SEQ ID NO: 69720 - protein, 275 aa, Bacillus sp. LG1
AQTVPWGIPHIKADKAHAAGVTGSGVKVAILDTGIDANHADLNVKGGASFVSGEPNALQDGNGHGTHVAGTVAALNNTTGVLGVAYNADLYAVKVLSASGSGTLSGIAQGIEWSISNGMNVINMSLGGSSGSTALQQACNNAYNRGIVVIAAAGNSGSSGNRNTMGYPARYSSVIAVGAVSNNNTRASFSSVGSELEVMAPGVNILSTTPGNNYASFNGTSMAAPHVAGAAALIKAKYPSMTNVQIRERLKNTATNLGDPFFYGKGVINVESALQ

SEQ ID NO: 69721 - protein, 275 aa, Bacillus sp. LG1
AQTVPWGIPHIKADKAHAAGVTGSGVKVAILDTGIDANHADLNVKGGASFVSGEPNALQDGNGHGTHVAGTVAALNNTTGVLGVAYNADLYAVKVLSASGSGTLSGIAQGIEWSISNGMNVINMSLGGSSGSTALQQACNNAYNRGIVIIAAAGNSGSSGNRNTMGYPARYSSVIAVGAVSSNNTRASFSSVGSELEVMAPGVNILSTTPGNNYASFNGTSMAAPHVAGAAALIKAKYPSMTNVQIRERLKNTATNLGDPFFYGKGVINVESALQ

SEQ ID NO: 69722 - protein, 275 aa, Bacillus sp. LG1
AQTVPWGIQHIKADKAHAAGVTGSGVKVAILDTGIDANHADLNVKGGASFVSGEPNALQDGNGHGTHVAGTVAALNNTTGVLGVAYNADLYAVKVLSASGSGTLSGIAQGIEWSISNGMNVINMSLGGSSGSTALQQACNNAYNRGIVVIAAAGNSGSSGNRNTMGYPARYSSVIAVGAVSSNNTRASFSSVGSELEVMAPGVNILSTTPGNNYASFNGTSMAAPHVAGAAALIKAKYPSMTNVQIRERLKNTATNLGDPFFYGKGVINVESALQ

SEQ ID NO: 69723 - protein, 275 aa, Bacillus sp. LG1
AQTVPWGIPHIKADKAHAAGVTGSGVKVAILDTGIDANHADLNVKGGASFGSGEPNALQDGNGHGTHVAGTVAALNNTTGVLGVAYNADLYAVKVLSASGSGTLSGIAQGIEWSISNGMNVINMSLGGSSGSTALQQACNNAYNRGIVVIAAAGNSGSSGNRNTMGYPARYSSVIAVGAVSSNNTRASFSSVGSELEVMAPGVNILSTTPGNNYASFNGTSMAAPHVAGAAALIKAKYPSMTNVQIRERLKNTATNLGDPFFYGKGVINVESALQ

SEQ ID NO: 69724 - protein, 275 aa, Bacillus sp. LG1
AQTVPWGIPHIKADKAHAAGVTGSGVKVAILDTGIDANHADLNVKGGASFVSGEPNALQDGNGHGTHVAGTVAALNNTTGVLGVAYNADLYAVKVLSASGSGTLSGIAQGIEWSISNGMNVINMSLGGSSGSTALQQACNNAYNRGIVVIAAAGNSGSSGNRNTMGYPARYSSVIAVGAVSSNNTRASFSSVGSELEVMAPGVNILSTTPGNNYASFNGTSMAAPHVAGAAALIKAKYPSMTNVVIRERLKNTATNLGDPFFYGKGVINVESALQ

SEQ ID NO: 69725 - protein, 275 aa, Bacillus sp. LG1
AQTVPWGIPHIKADKAHAAGVTGSGVKVAILDTGIDANHADLNVKGGASFVSGEPNALQDGNGHGTHVAGTVAALNNTTGVLGVAYNADLYAVKVLSASGSGTLSGQAQGIEWSISNGMNVINMSLGGSSGSTALQQACNNAYNRGIVVIAAAGNSGSSGNRNTMGYPARYSSVIAVGAVSSNNTRASFSSVGSELEVMAPGVNILSTTPGNNYASFNGTSMAAPHVAGAAALIKAKYPSMTNVQIRERLKNTATNLGDPFFYGKGVINVESALQ

SEQ ID NO: 69726 - protein, 275 aa, Bacillus sp. LG1
AQTVPWGIPHIKADKAHAAGVTGSGVKVAILDTGIDANHADLNVKGGASFVSGEPNALQDGNGHGTHVAGTVAALNNTTGVLGVAYNADLYAVKVLSASGSGTLSGIAQGIEWSISNEMNVINMSLGGSSGSTALQQACNNAYNRGIVVIAAAGNSGSSGNRNTMGYPARYSSVIAVGAVSSNNTRASFSSVGSELEVMAPGVNILSTTPGNNYASFNGTSMAAPHVAGAAALIKAKYPSMTNVQIRERLKNTATNLGDPFFYGKGVINVESALQ

SEQ ID NO: 69727 - protein, 275 aa, Bacillus sp. LG1
AQTVPWGIPHIKADKAHAAGVTGSGVKVAILDTGIDANHADLNVKGGASFVSGEPNALQDGNGHGTHVAGTVAALNNTTGVLGVAYNADLYAVKVLSASGSGTLSGIAQGIEWSISNGMNVINMSLGGSSGSTALQQACNNAYNRGIVVIHAAGNSGSSGNRNTMGYPARYSSVIAVGAVSSNNTRASFSSVGSELEVMAPGVNILSTTPGNNYASFNGTSMAAPHVAGAAALIKAKYPSMTNVQIRERLKNTATNLGDPFFYGKGVINVESALQ

SEQ ID NO: 69728 - protein, 275 aa, Bacillus sp. LG1
AQTVPWGIPHIKADKAHAAGVTGSGVKVAILDTGIDANHADLNVKGGASFVSGEPNALQDGNGHGTHVAGTVAALNNTTGVLGVAYNADLYAVKVLSASGSGTLSGIAQGIEWSISNGMNVINMSLGGSSGSTALQQACNNAYNRGIVVIAAAGNSGSSGNRNTMGYPARYSSVIAVGAVSSNNTRASFSSVGSELEVMAPGVNILSTTPGNNYASFNGTSHAAPHVAGAAALIKAKYPSMTNVQIRERLKNTATNLGDPFFYGKGVINVESALQ

SEQ ID NO: 69729 - protein, 275 aa, Bacillus sp. LG1
AQTVPWGIPHIKADKAHAAGVTGSGVKVAILDTGIDANHADLNVKGGASFVSGEPNALQDGNGHGTHVAGTVAALNNTTGVLGVAYNADQYAVKVLSASGSGTLSGIAQGIEWSISNGMNVINMSLGGSSGSTALQQACNNAYNRGIVVIAAAGNSGSSGNRNTMGYPARYSSVIAVGAVSSNNTRASFSSVGSELEVMAPGVNILSTTPGNNYASFNGTSMAAPHVAGAAALIKAKYPSMTNVQIRERLKNTATNLGDPFFYGKGVINVESALQ

SEQ ID NO: 69730 - protein, 275 aa, Bacillus sp. LG1
AQTVPWGIPHIKADKAHAAGVTGSGVQVAILDTGIDANHADLNVKGGASFVSGEPNALQDGNGHGTHVAGTVAALNNTTGVLGVAYNADLYAVKVLSASGSGTLSGIAQGIEWSISNGMNVINMSLGGSSGSTALQQACNNAYNRGIVVIAAAGNSGSSGNRNTMGYPARYSSVIAVGAVSSNNTRASFSSVGSELEVMAPGVNILSTTPGNNYASFNGTSMAAPHVAGAAALIKAKYPSMTNVQIRERLKNTATNLGDPFFYGKGVINVESALQ

SEQ ID NO: 69731 - protein, 275 aa, Bacillus sp. LG1
AQTVPWGIPHIKADKAHAAGVTGSGVKVAILDTGIDANHADLNVKGGASFVSGEPNALQDGNGHGTHVAGTVAALNNTTGVLGVAYNADLYAVKVLSASGSGTLSGIAQGIEWSISNGMNVINMSLGGSSGSTALQQACNNAYNRGIVVIAAAGNSGSSGNRNTMGYPARYSSVIAVGAVSSNNTRASFSSVGSELEVMAPGVNILSTTPGNNYASFNGTSMAAPHVAGAAALIKAKYPSMTNVQIRERIKNTATNLGDPFFYGKGVINVESALQ

SEQ ID NO: 69732 - protein, 275 aa, Bacillus sp. LG1
AQTVPWGIPHIKADKAHAAGVTGSGVKVAILDTGIDANHADLNVKGGASFVSGEPNALQDGNGHGTHVAGTVAALNNTTGVLGVAYNADLYAVKVLSASGSGTLSGIAQGIEFSISNGMNVINMSLGGSSGSTALQQACNNAYNRGIVVIAAAGNSGSSGNRNTMGYPARYSSVIAVGAVSSNNTRASFSSVGSELEVMAPGVNILSTTPGNNYASFNGTSMAAPHVAGAAALIKAKYPSMTNVQIRERLKNTATNLGDPFFYGKGVINVESALQ

SEQ ID NO: 69733 - protein, 275 aa, Bacillus sp. LG1
AQTVPWGIPHIKADKAHAAGVTGSGVKVAILDTGIDANHADLNVKGGASFVSGEPNALQDGNGHGTHVAGTVAALNNTTGLLGVAYNADLYAVKVLSASGSGTLSGIAQGIEWSISNGMNVINMSLGGSSGSTALQQACNNAYNRGIVVIAAAGNSGSSGNRNTMGYPARYSSVIAVGAVSSNNTRASFSSVGSELEVMAPGVNILSTTPGNNYASFNGTSMAAPHVAGAAALIKAKYPSMTNVQIRERLKNTATNLGDPFFYGKGVINVESALQ

SEQ ID NO: 69734 - protein, 275 aa, Bacillus sp. LG1
AQTVPWGIPHIKADKAHAAGVTGSGVKVAILDTGIDANHADLNVKGGASFVSGEPNALQDGNGHGTHVAGTVAALNGTTGVLGVAYNADLYAVKVLSASGSGTLSGIAQGIEWSISNGMNVINMSLGGSSGSTALQQACNNAYNRGIVVIAAAGNSGSSGNRNTMGYPARYSSVIAVGAVSSNNTRASFSSVGSELEVMAPGVNILSTTPGNNYASFNGTSMAAPHVAGAAALIKAKYPSMTNVQIRERLKNTATNLGDPFFYGKGVINVESALQ

SEQ ID NO: 69735 - protein, 275 aa, Bacillus sp. LG1
AQTVPWGIPHIKADKAHAAGVTGSGVKVAILDTGIDANHADLNVKGGASFVSGEPNALQDGNGHGTHVAGTVAALNNTTGVLGVAYNADLYAVKVLSASGSGTLSGIAQGIEWSISSGMNVINMSLGGSSGSTALQQACNNAYNRGIVVIAAAGNSGSSGNRNTMGYPARYSSVIAVGAVSSNNTRASFSSVGSELEVMAPGVNILSTTPGNNYASFNGTSMAAPHVAGAAALIKAKYPSMTNVQIRERLKNTATNLGDPFFYGKGVINVESALQ

SEQ ID NO: 69736 - protein, 275 aa, Bacillus sp. LG1
AQTVPWGIPHIKADKAHAAGVTGSGVKLAILDTGIDANHADLNVKGGASFVSGEPNALQDGNGHGTHVAGTVAALNNTTGVLGVAYNADLYAVKVLSASGSGTLSGIAQGIEWSISNGMNVINMSLGGSSGSTALQQACNNAYNRGIVVIAAAGNSGSSGNRNTMGYPARYSSVIAVGAVSSNNTRASFSSVGSELEVMAPGVNILSTTPGNNYASFNGTSMAAPHVAGAAALIKAKYPSMTNVQIRERLKNTATNLGDPFFYGKGVINVESALQ

SEQ ID NO: 69737 - protein, 275 aa, Bacillus amyloliquefaciens
AQSVPYGVSQIKAPALHSQGYTGSNVKVAVIDSGIDSSHPDLKVVGGASMVPSETNPFQDNNSHGTHVAGTVAALNNSIGVLGVAPSASLYAVKVLCRSGSGQYSWIINGIEWAIANNMDVINMSLGGPSGSAALKAAVDKAVASGVVVVAAAGNEGTSGSSSTVGYPGKYPSVIAVGAVDSSNQRASFSSVGPELDVMAPGVSIQSTLPGNKYGALNGTSMASPHVAGAAALILSKHPNWTNTQVRSSLENTTTKLGDSFYYGKGLINVQAAAQ

SEQ ID NO: 69738 - protein, 275 aa, Bacillus sp. LG1
AQTVPWGIPHAKADKAHAAGVTGSGVKVAILDTGIDANHADLNVKGGASFVSGEPNALQDGNGHGTHVAGTVAALNNTTGVLGVAYNADLYAVKVLSASGSGTLSGIAQGIEWSISNGMNVINMSLGGSSGSTALQQACNNAYNRGIVVIAAAGNSGSSGNRNTMGYPARYSSVIAVGAVSSNNTRASFSSVGSELEVMAPGVNILSTTPGNNYASFNGTSMAAPHVAGAAALIKAKYPSMTNVQIRERLKNTATNLGDPFFYGKGVINVESALQ

SEQ ID NO: 69739 - protein, 275 aa, Bacillus sp. LG1
AQTVPWGIPHIKADKAHAAGVTGSGVKVAILDTGIDANHADLNVKGGASFRSGEPNALQDGNGHGTHVAGTVAALNNTTGVLGVAYNADLYAVKVLSASGSGTLSGIAQGIEWSISNGMNVINMSLGGSSGSTALQQACNNAYNRGIVVIAAAGNSGSSGNRNTMGYPARYSSVIAVGAVSSNNTRASFSSVGSELEVMAPGVNILSTTPGNNYASFNGTSMAAPHVAGAAALIKAKYPSMTNVQIRERLKNTATNLGDPFFYGKGVINVESALQ

SEQ ID NO: 69740 - protein, 275 aa, Bacillus sp. LG1
AQTVPWGIPHIKADKAHAAGVTGSGVKVAILDTGIDANHADLNVKGGASFVSGEPNALQDGNGHGTHVAGTPAALNNTTGVLGVAYNADLYAVKVLSASGSGTLSGIAQGIEWSISNGMNVINMSLGGSSGSTALQQACNNAYNRGIVVIAAAGNSGSSGNRNTMGYPARYSSVIAVGAVSSNNTRASFSSVGSELEVMAPGVNILSTTPGNNYASFNGTSMAAPHVAGAAALIKAKYPSMTNVQIRERLKNTATNLGDPFFYGKGVINVESALQ

SEQ ID NO: 69741 - protein, 275 aa, Bacillus sp. LG1
AQTVPWGIPHIKADKAHAAGVTGSGVKVAILDTGIDANHADLNVKGGASFVSGEPNALQDGNGHGTHVAGTVAALNNTTGVLGVAYNADLYAVKVLSASGSGTLSGIAQGIEWSISNGTNVINMSLGGSSGSTALQQACNNAYNRGIVVIAAAGNSGSSGNRNTMGYPARYSSVIAVGAVSSNNTRASFSSVGSELEVMAPGVNILSTTPGNNYASFNGTSMAAPHVAGAAALIKAKYPSMTNVQIRERLKNTATNLGDPFFYGKGVINVESALQ

SEQ ID NO: 69742 - protein, 275 aa, Bacillus sp. LG1
AQTVPWGIPHIKADKAHAAGVTGSGVKVAILDTGIDANHADLNVKGGASFVSGEPNALQDGNGHGTHVAGTVAALNNTTGVLGVAYNADLYAVKVLSASGSGTLSGIAQGIEWSISNGMNVINMSLGGSSGSTALQQACNNAYNRGIVVIAAAGNSGSSGNRNTMGYPARYSSVIAVGAVSSNNTRASFSSVGSELEVMAPGVNILSTTPGNNYASFNGTSYAAPHVAGAAALIKAKYPSMTNVQIRERLKNTATNLGDPFFYGKGVINVESALQ

SEQ ID NO: 69743 - protein, 275 aa, Bacillus sp. LG1
AQTVPWGIPHIKADKAHAAGVTGSGVKVAILDTGIDANHADLNVKGGASFVSGEPNALQDGNGHGTHMAGTVAALNNTTGVLGVAYNADLYAVKVLSASGSGTLSGIAQGIEWSISNGMNVINMSLGGSSGSTALQQACNNAYNRGIVVIAAAGNSGSSGNRNTMGYPARYSSVIAVGAVSSNNTRASFSSVGSELEVMAPGVNILSTTPGNNYASFNGTSMAAPHVAGAAALIKAKYPSMTNVQIRERLKNTATNLGDPFFYGKGVINVESALQ

SEQ ID NO: 69744 - protein, 275 aa, Bacillus sp. LG1
AQTVPWGIPHIRADKAHAAGVTGSGVKVAILDTGIDANHADLNVKGGASFVSGEPNALQDGNGHGTHVAGTVAALNNTTGVLGVAYNADLYAVKVLSASGSGTLSGIAQGIEWSISNGMNVINMSLGGSSGSTALQQACNNAYNRGIVVIAAAGNSGSSGNRNTMGYPARYSSVIAVGAVSSNNTRASFSSVGSELEVMAPGVNILSTTPGNNYASFNGTSMAAPHVAGAAALIKAKYPSMTNVQIRERLKNTATNLGDPFFYGKGVINVESALQ

SEQ ID NO: 69745 - protein, 275 aa, Bacillus sp. LG1
AQTVPWGIPHIKADKAHAAGVTGSGVKVAILDTGIDANHADLNVKGGASFVSGEPNALQDGNGHGTHVAGTVAALNNTTGVLGVAYNADLYAVKVLSASGSGTLSGIAQGIEWSISNGMNVINMSLGGSSGSTALQQACNNAYNRGIVVIAAAGNSGSSGNRNTMGYPARYSSVIAVGAVSSNNTRASFSSVGSELEVMAPGVNILSTTPGNNYASFNGTSMAAPHVAGAAALIKAKYPSMTNVQIRERLKNTGTNLGDPFFYGKGVINVESALQ

SEQ ID NO: 69746 - protein, 275 aa, Bacillus sp. LG1
AQTVPWGIPHIKADKAHAAGVTGSGVKVAILDTGIDANHADLNVKGGASFVSGEPNALQDGNGHGTHVAGTVAALNNTTGVLGVAYNADLYAVKVLSASGSGTLSGIAQGIEWSISNGMNVINMSLGGSSGSTALQQACNNAYNRGIVVIAAAGNSGSSGNRNTMGYPARYSSVIAVGAVSSNNTRASTSSVGSELEVMAPGVNILSTTPGNNYASFNGTSMAAPHVAGAAALIKAKYPSMTNVQIRERLKNTATNLGDPFFYGKGVINVESALQ

SEQ ID NO: 69747 - protein, 275 aa, Bacillus sp. LG1
AQTVPWGIPHIKADKAHAAGVTGSGVKVAILDTGIDANHADLNVKGGASFVSGEPNALQDGNGHGTHVAGTVAALNNTTGVLGVAYNADLYAVKVLSASGSGTLSTIAQGIEWSISNGMNVINMSLGGSSGSTALQQACNNAYNRGIVVIAAAGNSGSSGNRNTMGYPARYSSVIAVGAVSSNNTRASFSSVGSELEVMAPGVNILSTTPGNNYASFNGTSMAAPHVAGAAALIKAKYPSMTNVQIRERLKNTATNLGDPFFYGKGVINVESALQ

SEQ ID NO: 69748 - protein, 275 aa, Bacillus sp. LG1
AQTVPWGISHIKADKAHAAGVTGSGVKVAILDTGIDANHADLNVKGGASFVSGEPNALQDGNGHGTHVAGTVAALNNTTGVLGVAYNADLYAVKVLSASGSGTLSGIAQGIEWSISNGMNVINMSLGGSSGSTALQQACNNAYNRGIVVIAAAGNSGSSGNRNTMGYPARYSSVIAVGAVSSNNTRASFSSVGSELEVMAPGVNILSTTPGNNYASFNGTSMAAPHVAGAAALIKAKYPSMTNVQIRERLKNTATNLGDPFFYGKGVINVESALQ

SEQ ID NO: 69749 - protein, 275 aa, Bacillus sp. LG1
AQTVPWGIPHIKADKAHAAGVTGSGVKVAILDTGIDANHADLNVKGGASFVSGEPNALQDGNGHGTHVAGTVAALNNTTGVLGVAYNADLYAVKVLSASGSGTLSGVAQGIEWSISNGMNVINMSLGGSSGSTALQQACNNAYNRGIVVIAAAGNSGSSGNRNTMGYPARYSSVIAVGAVSSNNTRASFSSVGSELEVMAPGVNILSTTPGNNYASFNGTSMAAPHVAGAAALIKAKYPSMTNVQIRERLKNTATNLGDPFFYGKGVINVESALQ

SEQ ID NO: 69750 - protein, 275 aa, Bacillus sp. LG1
AQTVPWGIPHIKADKAHAAGVTGSGVKVAILDTGIDANHADLNVKGGASFVSGEPNALQDGWGHGTHVAGTVAALNNTTGVLGVAYNADLYAVKVLSASGSGTLSGIAQGIEWSISNGMNVINMSLGGSSGSTALQQACNNAYNRGIVVIAAAGNSGSSGNRNTMGYPARYSSVIAVGAVSSNNTRASFSSVGSELEVMAPGVNILSTTPGNNYASFNGTSMAAPHVAGAAALIKAKYPSMTNVQIRERLKNTATNLGDPFFYGKGVINVESALQ

SEQ ID NO: 69751 - protein, 275 aa, Bacillus sp. LG1
AQTHPWGIPHIKADKAHAAGVTGSGVKVAILDTGIDANHADLNVKGGASFVSGEPNALQDGNGHGTHVAGTVAALNNTTGVLGVAYNADLYAVKVLSASGSGTLSGIAQGIEWSISNGMNVINMSLGGSSGSTALQQACNNAYNRGIVVIAAAGNSGSSGNRNTMGYPARYSSVIAVGAVSSNNTRASFSSVGSELEVMAPGVNILSTTPGNNYASFNGTSMAAPHVAGAAALIKAKYPSMTNVQIRERLKNTATNLGDPFFYGKGVINVESALQ

SEQ ID NO: 69752 - protein, 275 aa, Bacillus sp. LG1
AQTVPWGIPHIKADKAHAAGVTGSGVKVAILDTGIDFNHADLNVKGGASFVSGEPNALQDGNGHGTHVAGTVAALNNTTGVLGVAYNADLYAVKVLSASGSGTLSGIAQGIEWSISNGMNVINMSLGGSSGSTALQQACNNAYNRGIVVIAAAGNSGSSGNRNTMGYPARYSSVIAVGAVSSNNTRASFSSVGSELEVMAPGVNILSTTPGNNYASFNGTSMAAPHVAGAAALIKAKYPSMTNVQIRERLKNTATNLGDPFFYGKGVINVESALQ

SEQ ID NO: 69753 - protein, 275 aa, Bacillus sp. LG1
AQTVPWGIPHIKADKAHAAGVTGSGVKVAILDTGIDANHADLNVKGGASFVSIEPNALQDGNGHGTHVAGTVAALNNTTGVLGVAYNADLYAVKVLSASGSGTLSGIAQGIEWSISNGMNVINMSLGGSSGSTALQQACNNAYNRGIVVIAAAGNSGSSGNRNTMGYPARYSSVIAVGAVSSNNTRASFSSVGSELEVMAPGVNILSTTPGNNYASFNGTSMAAPHVAGAAALIKAKYPSMTNVQIRERLKNTATNLGDPFFYGKGVINVESALQ

SEQ ID NO: 69754 - protein, 275 aa, Bacillus sp. LG1
AQTVPWGIPHIKADKAHAAGVTGSGVKVAILDTGIDANHADLNVKGGASFVSGEPNALQDGNGHGTHVAGTVAALNNTTGVLGVAYNADLYAVKVLSASGSGTLSGIAQGIEWSISNGMNVINMSLGGSSGSTALQQACNNAYNRGIVVIAAAGNSGSSGNRNTMGYPARYSSVIAVGAVSSNNTRASFSSVGSELEVMAPGVNILVTTPGNNYASFNGTSMAAPHVAGAAALIKAKYPSMTNVQIRERLKNTATNLGDPFFYGKGVINVESALQ

SEQ ID NO: 69755 - protein, 275 aa, Bacillus sp. LG1
AQTVPWGIPHIKADKAHAAGVTGSGVKVAILDTGIDANHADLNVKGGASFVSGEPNALQDGNGHGTHVAGTVAALNNTTGVLGVAYNADLYAVKVLSASGSGTLSGIAQGIEWSISNDMNVINMSLGGSSGSTALQQACNNAYNRGIVVIAAAGNSGSSGNRNTMGYPARYSSVIAVGAVSSNNTRASFSSVGSELEVMAPGVNILSTTPGNNYASFNGTSMAAPHVAGAAALIKAKYPSMTNVQIRERLKNTATNLGDPFFYGKGVINVESALQ

SEQ ID NO: 69756 - protein, 275 aa, Bacillus sp. LG1
AQTVPWGIPHIKADKAHAAGVTGSGVKVAILDTGIDANHADLNVKGGASFVSGEPNALQDGNGHGTHVAGTVAALNNTTGVLGVAYNADLYAVKVLSASGSGTLSGIAQGIEWSISNGMNVINMSLGGSSGSTALQQACNNAYNRGIVVIAAAGNSGSSGNRNTMGYPARYSSVIAVGAVSSNNTRASFSSVGSELEVMAPGVNILSTTPGNNYASFNGTSMAAPHVAGAAALIKAKYPSMTNVQIRERLKNTALNLGDPFFYGKGVINVESALQ

SEQ ID NO: 69757 - protein, 275 aa, Bacillus sp. LG1
AQTVPWGIPHIKADKAHAAGVTGSGVKVAILDTGIDANHADLNVKGGASFVSGEPNALQDGNGHGTHVAGSVAALNNTTGVLGVAYNADLYAVKVLSASGSGTLSGIAQGIEWSISNGMNVINMSLGGSSGSTALQQACNNAYNRGIVVIAAAGNSGSSGNRNTMGYPARYSSVIAVGAVSSNNTRASFSSVGSELEVMAPGVNILSTTPGNNYASFNGTSMAAPHVAGAAALIKAKYPSMTNVQIRERLKNTATNLGDPFFYGKGVINVESALQ

SEQ ID NO: 69758 - protein, 275 aa, Bacillus sp. LG1
AQTVPWGIPHIKADKAHAAGVTGSGVKVAILDTGIDANHADLNVKGGASFVSGEPNALQDGNGHGTHVAGTVAALNNTTGVLGVAYNADLYAVKVLSASGSGTLSGIAQGIEWSISNGMNVINMSLGGSSGSTALQQACNNAYNRGIVVIAAAGNSGSSGNRNTMGYPARYSSVIAVGAVSSNNTRASFSSVGSELEVMAPGVNILSTTPGNNYASFNGTSMAAPDVAGAAALIKAKYPSMTNVQIRERLKNTATNLGDPFFYGKGVINVESALQ

SEQ ID NO: 69759 - protein, 275 aa, Bacillus sp. LG1
AQTVPWGIVHIKADKAHAAGVTGSGVKVAILDTGIDANHADLNVKGGASFVSGEPNALQDGNGHGTHVAGTVAALNNTTGVLGVAYNADLYAVKVLSASGSGTLSGIAQGIEWSISNGMNVINMSLGGSSGSTALQQACNNAYNRGIVVIAAAGNSGSSGNRNTMGYPARYSSVIAVGAVSSNNTRASFSSVGSELEVMAPGVNILSTTPGNNYASFNGTSMAAPHVAGAAALIKAKYPSMTNVQIRERLKNTATNLGDPFFYGKGVINVESALQ

SEQ ID NO: 69760 - protein, 275 aa, Bacillus sp. LG1
AQTVPWGIPHIKADKAHAAGVTGSGVKVAILDTGIDANHADLNVKGGASFWSGEPNALQDGNGHGTHVAGTVAALNNTTGVLGVAYNADLYAVKVLSASGSGTLSGIAQGIEWSISNGMNVINMSLGGSSGSTALQQACNNAYNRGIVVIAAAGNSGSSGNRNTMGYPARYSSVIAVGAVSSNNTRASFSSVGSELEVMAPGVNILSTTPGNNYASFNGTSMAAPHVAGAAALIKAKYPSMTNVQIRERLKNTATNLGDPFFYGKGVINVESALQ

SEQ ID NO: 69761 - protein, 275 aa, Bacillus sp. LG1
AQTVPWGIPHIKADKAHAAGVTGSGVKVAILDTGIDANHADLSVKGGASFVSGEPNALQDGNGHGTHVAGTVAALNNTTGVLGVAYNADLYAVKVLSASGSGTLSGIAQGIEWSISNGMNVINMSLGGSSGSTALQQACNNAYNRGIVVIAAAGNSGSSGNRNTMGYPARYSSVIAVGAVSSNNTRASFSSVGSELEVMAPGVNILSTTPGNNYASFNGTSMAAPHVAGAAALIKAKYPSMTNVQIRERLKNTATNLGDPFFYGKGVINVESALQ

SEQ ID NO: 69762 - protein, 275 aa, Bacillus sp.
AQTVPWGIPHIKADKAHAAGVTGSGVKVAILDTGIDANHADLNVKGGASFVSGEPNALQDGNGHGTHVAGTVAALDNTTGVLGVAYNADLYAVKVLSASGSGTLSGIAQGIEWSISNRMNVINMSLGWLSGSTALQQACNNAYNRGIVVIAAAGNSGSSGNRNTMDYPARYSSVIAVGAVSSNNTRASFSSVGSELEVMAPGVNILSTTPGNNYASFNGTSMAAPHVAGAAALIKAKYPSMTNVQIRNRLKNTATNLGDPFFYGKGVINVESALQ

SEQ ID NO: 69763 - protein, 275 aa, Bacillus sp. LG1
AQTVPWGIPHIKADKAHAAGVTGSGVKVAILDTGIDANHADLNVKGGASFVSGEPNALQDGNGHGTHVAGTVAALNNTTGVLGVAYNADLYAVKVLSASGSGTLSGIAQGIEWSISNGMNVINMSLGGSSGSTALQQACNNAYNRGIVVIAAAGNSGSSMNRNTMGYPARYSSVIAVGAVSSNNTRASFSSVGSELEVMAPGVNILSTTPGNNYASFNGTSMAAPHVAGAAALIKAKYPSMTNVQIRERLKNTATNLGDPFFYGKGVINVESALQ

SEQ ID NO: 69764 - protein, 275 aa, Bacillus sp. LG1
AQTVPWGIPHIKADKAHAAGVTGSGVKVAILDTGIDANHADLNVKGGASFVSGEPNALQDGNGHGTHVAGTVAALNNTTGVLGVAYNADLYAVKVLSASGSGTLSGIAQGIEWSISNGMNVINMSLGGSSGSTALQQACNNAYNRGIVVIAAAGNSGSSGNRNTMGYPARYSSVIAVGAVSSNNTRASFSSVGSELEVMAPGVNILSTTSGNNYASFNGTSMAAPHVAGAAALIKAKYPSMTNVQIRERLKNTATNLGDPFFYGKGVINVESALQ

SEQ ID NO: 69765 - protein, 275 aa, Bacillus sp. LG1
AQTVPWGIPHIKADKAHAAGVTGSGVKVAILDTGIDANHADLNVKGGASFVSGEPNALQDGNGHGTHVAGTVAALNNTTGVLGVAYNADLYAVKVLSASGSGTLSGIAQGIEWSISNGMNVINMSLGGSSGSTALQQACNNAYNRGIVVIAAAGNSGSSGNRNTMGYPARYSSVIAVGAVSSNNTRASFSSVGSELEVMAPGVNILSTTPGNNYASFNGTSMAAPHVAGAAALIKAKYPSMTNVQIRERLKNTATNLGDPFFYGKGVINYESALQ

SEQ ID NO: 69766 - protein, 275 aa, Bacillus sp. LG1
AQTVPWGIPHIKADKAHAAGVTGSGFKVAILDTGIDANHADLNVKGGASFVSGEPNALQDGNGHGTHVAGTVAALNNTTGVLGVAYNADLYAVKVLSASGSGTLSGIAQGIEWSISNGMNVINMSLGGSSGSTALQQACNNAYNRGIVVIAAAGNSGSSGNRNTMGYPARYSSVIAVGAVSSNNTRASFSSVGSELEVMAPGVNILSTTPGNNYASFNGTSMAAPHVAGAAALIKAKYPSMTNVQIRERLKNTATNLGDPFFYGKGVINVESALQ

SEQ ID NO: 69767 - protein, 275 aa, Bacillus sp. LG1
AQTVPWGIPHIKADKAHAAGVTGSGVKVAILDTGIDANHADLNVKGGASFVSGEPNALQDGNGHGTHVAGTVAALNNTTGVLGVAYNADLYAVKVLSASGSGTLSGIAQGIEWSISNGMNVINMSLGGSSGSTALQQACNNAYNRGIVVIAAAGNSGSSGNRNTMGYPARYSSVIAVGAVSSNNTRASFSSVGSEMEVMAPGVNILSTTPGNNYASFNGTSMAAPHVAGAAALIKAKYPSMTNVQIRERLKNTATNLGDPFFYGKGVINVESALQ

SEQ ID NO: 69768 - protein, 275 aa, Bacillus sp. LG1
AQTVPWGIPHIKADKAHAAGVTGSGVKVAILDTGIDANHADLNVKGGASFVSGEPNALQDGNGHGTHVAGTVAALNNTTGVLGVAYNADLYAVKVLSASGSGTLSGIAQGIEWSISNGMNVINMSLGGSSGSTALQQSCNNAYNRGIVVIAAAGNSGSSGNRNTMGYPARYSSVIAVGAVSSNNTRASFSSVGSELEVMAPGVNILSTTPGNNYASFNGTSMAAPHVAGAAALIKAKYPSMTNVQIRERLKNTATNLGDPFFYGKGVINVESALQ

SEQ ID NO: 69769 - protein, 275 aa, Bacillus sp. LG1
AQTVPWGIPHIKADKAHAAGVTGSGVKVAILDTGIDANHADLNVKGGASFVSGEPNALQDGNGHGTHVAGTVAALNNTTGVLGVAYNADLYAVKVLSASGMGTLSGIAQGIEWSISNGMNVINMSLGGSSGSTALQQACNNAYNRGIVVIAAAGNSGSSGNRNTMGYPARYSSVIAVGAVSSNNTRASFSSVGSELEVMAPGVNILSTTPGNNYASFNGTSMAAPHVAGAAALIKAKYPSMTNVQIRERLKNTATNLGDPFFYGKGVINVESALQ

SEQ ID NO: 69770 - protein, 275 aa, Bacillus sp. LG1
AQTVPWGIPHIKADKAHAAGVTGSGVKVAILDTGIDANHADLNVKGGASFVSGEPNALQDGNGHGTHVAGTVAALNNTTGVLGVAYNADLYAVKVLSASGSGTLSGIAQGIEWSISNGMNVINMSLGGSSGSTALQQACNNAYNRGIVVIAAAGNSGSSGNRNTMGYPARYSSVIAVGAVSSNNTRASFSSVGSELEVMAPGVNILSTTPGNNYASFNGTSMAAPHVAGAAALIKAKYPSMTNVQIRERLKNTATNIGDPFFYGKGVINVESALQ

SEQ ID NO: 69771 - protein, 275 aa, Bacillus sp. LG1
AQTVPWGIPHIKADKAHAAGVTGSGVKVAILDTGIDANHADLNVKGGASFVSGEPNALQDGNGHGTHVAGTVAALNNTTGVLGVAYNADLYAVKVLSASGSGTLSGIAQGIEWSISNGMNVINMSLGGSSGSTALQQACNNAYNRGIVVIAVAGNSGSSGNRNTMGYPARYSSVIAVGAVSSNNTRASFSSVGSELEVMAPGVNILSTTPGNNYASFNGTSMAAPHVAGAAALIKAKYPSMTNVQIRERLKNTATNLGDPFFYGKGVINVESALQ

SEQ ID NO: 69772 - protein, 275 aa, Bacillus sp. LG1
AQTVPWGIPHIKADKAHAAGVTGSGVKVAILDTGIDANHADLNVKGGASFVSGEPNALQDGNGHGTHVAGTVAALNNTTGVLGVAYNADLYAVKVLSASGSGTLSGIAQGIEWSISLGMNVINMSLGGSSGSTALQQACNNAYNRGIVVIAAAGNSGSSGNRNTMGYPARYSSVIAVGAVSSNNTRASFSSVGSELEVMAPGVNILSTTPGNNYASFNGTSMAAPHVAGAAALIKAKYPSMTNVQIRERLKNTATNLGDPFFYGKGVINVESALQ

SEQ ID NO: 69773 - protein, 275 aa, Bacillus sp. LG1
AQTVPWGIPHIKADKAHAAGVTGSGVKVAILDTGIDANHADLNVKGGASFVSGEPNALQDGNGHGTHVAGTVAALNNTTGVLGVAYNADLYAVKVLSASGSGTLSGIAQGIEWSISFGMNVINMSLGGSSGSTALQQACNNAYNRGIVVIAAAGNSGSSGNRNTMGYPARYSSVIAVGAVSSNNTRASFSSVGSELEVMAPGVNILSTTPGNNYASFNGTSMAAPHVAGAAALIKAKYPSMTNVQIRERLKNTATNLGDPFFYGKGVINVESALQ

SEQ ID NO: 69774 - protein, 275 aa, Bacillus sp. LG1
AQTVPWGIPHIKADKAHAAGVTGSGVKVAILDTGIDANHADLNVKGGASFVSQEPNALQDGNGHGTHVAGTVAALNNTTGVLGVAYNADLYAVKVLSASGSGTLSGIAQGIEWSISNGMNVINMSLGGSSGSTALQQACNNAYNRGIVVIAAAGNSGSSGNRNTMGYPARYSSVIAVGAVSSNNTRASFSSVGSELEVMAPGVNILSTTPGNNYASFNGTSMAAPHVAGAAALIKAKYPSMTNVQIRERLKNTATNLGDPFFYGKGVINVESALQ

SEQ ID NO: 69775 - protein, 275 aa, Bacillus sp. LG1
AQTVPWGIPHIKADKAHAAGVTGSGVKVAILDTGIDANHADLNVKGGASFVSGEPNALQDGNGHGTHVAGTVAALNNTTGVLGVAYNADLYAVKVLSASGSGTLSGTAQGIEWSISNGMNVINMSLGGSSGSTALQQACNNAYNRGIVVIAAAGNSGSSGNRNTMGYPARYSSVIAVGAVSSNNTRASFSSVGSELEVMAPGVNILSTTPGNNYASFNGTSMAAPHVAGAAALIKAKYPSMTNVQIRERLKNTATNLGDPFFYGKGVINVESALQ

SEQ ID NO: 69776 - protein, 275 aa, Bacillus sp. LG1
AQTVPWGIPHIKADKAHAAGVTGSGVKVAILDTGIDANHADLNVKGGASFVSGEPNALQDGNGHGTHVAGTVAALNNTTGVLGVAYNADLYAVKVLSASGSGTLSGIAQGIEWSISNGMNVINMSLGGSSGSTALQQACNNAYNRGIVVIAAAGNSGSSGNRNTMGYPARYSSVIAVGAVSSNNTRASFSSVGSELEVMAPGVNILSTTPGNNYASFNGTSMAAPTVAGAAALIKAKYPSMTNVQIRERLKNTATNLGDPFFYGKGVINVESALQ

SEQ ID NO: 69777 - protein, 275 aa, Bacillus sp. LG1
AQTVPWGIPHIKADKAHAAGVTGSGVKVAILDTGIDANHADLNVKGGASFLSGEPNALQDGNGHGTHVAGTVAALNNTTGVLGVAYNADLYAVKVLSASGSGTLSGIAQGIEWSISNGMNVINMSLGGSSGSTALQQACNNAYNRGIVVIAAAGNSGSSGNRNTMGYPARYSSVIAVGAVSSNNTRASFSSVGSELEVMAPGVNILSTTPGNNYASFNGTSMAAPHVAGAAALIKAKYPSMTNVQIRERLKNTATNLGDPFFYGKGVINVESALQ

SEQ ID NO: 69778 - protein, 275 aa, Bacillus sp. LG1
AQTVPWGIPHIKADKAHAAGVTGSGVKTAILDTGIDANHADLNVKGGASFVSGEPNALQDGNGHGTHVAGTVAALNNTTGVLGVAYNADLYAVKVLSASGSGTLSGIAQGIEWSISNGMNVINMSLGGSSGSTALQQACNNAYNRGIVVIAAAGNSGSSGNRNTMGYPARYSSVIAVGAVSSNNTRASFSSVGSELEVMAPGVNILSTTPGNNYASFNGTSMAAPHVAGAAALIKAKYPSMTNVQIRERLKNTATNLGDPFFYGKGVINVESALQ

SEQ ID NO: 69779 - protein, 275 aa, Bacillus sp. LG1
AQTFPWGIPHIKADKAHAAGVTGSGVKVAILDTGIDANHADLNVKGGASFVSGEPNALQDGNGHGTHVAGTVAALNNTTGVLGVAYNADLYAVKVLSASGSGTLSGIAQGIEWSISNGMNVINMSLGGSSGSTALQQACNNAYNRGIVVIAAAGNSGSSGNRNTMGYPARYSSVIAVGAVSSNNTRASFSSVGSELEVMAPGVNILSTTPGNNYASFNGTSMAAPHVAGAAALIKAKYPSMTNVQIRERLKNTATNLGDPFFYGKGVINVESALQ

SEQ ID NO: 69780 - protein, 275 aa, Bacillus sp. LG1
AQTVPWGIPHIKADKAHAAGVTGSGVKVAILDTGIDANHADLNVKGGASFVSGEPNALQDGNNHGTHVAGTVAALNNTTGVLGVAYNADLYAVKVLSASGSGTLSGIAQGIEWSISNGMNVINMSLGGSSGSTALQQACNNAYNRGIVVIAAAGNSGSSGNRNTMGYPARYSSVIAVGAVSSNNTRASFSSVGSELEVMAPGVNILSTTPGNNYASFNGTSMAAPHVAGAAALIKAKYPSMTNVQIRERLKNTATNLGDPFFYGKGVINVESALQ

SEQ ID NO: 69781 - protein, 275 aa, Bacillus sp. LG1
AQTVPWGIPHIKADKAHAAGVTGSGVKVAILDTGIDANHADLNVKGGAIFVSGEPNALQDGNGHGTHVAGTVAALNNTTGVLGVAYNADLYAVKVLSASGSGTLSGIAQGIEWSISNGMNVINMSLGGSSGSTALQQACNNAYNRGIVVIAAAGNSGSSGNRNTMGYPARYSSVIAVGAVSSNNTRASFSSVGSELEVMAPGVNILSTTPGNNYASFNGTSMAAPHVAGAAALIKAKYPSMTNVQIRERLKNTATNLGDPFFYGKGVINVESALQ

SEQ ID NO: 69782 - protein, 275 aa, Bacillus sp. LG1
AQTVPWGGPHIKADKAHAAGVTGSGVKVAILDTGIDANHADLNVKGGASFVSGEPNALQDGNGHGTHVAGTVAALNNTTGVLGVAYNADLYAVKVLSASGSGTLSGIAQGIEWSISNGMNVINMSLGGSSGSTALQQACNNAYNRGIVVIAAAGNSGSSGNRNTMGYPARYSSVIAVGAVSSNNTRASFSSVGSELEVMAPGVNILSTTPGNNYASFNGTSMAAPHVAGAAALIKAKYPSMTNVQIRERLKNTATNLGDPFFYGKGVINVESALQ

SEQ ID NO: 69783 - protein, 275 aa, Bacillus sp. LG1
AQTVPWGIPHIKADKAHAAGVTGSGVKVAILDTGIDANHADLNVKGGASFVSGEPNALQDGNGHGTHVAGTVAALNNTTGVLGVAYNADLNAVKVLSASGSGTLSGIAQGIEWSISNGMNVINMSLGGSSGSTALQQACNNAYNRGIVVIAAAGNSGSSGNRNTMGYPARYSSVIAVGAVSSNNTRASFSSVGSELEVMAPGVNILSTTPGNNYASFNGTSMAAPHVAGAAALIKAKYPSMTNVQIRERLKNTATNLGDPFFYGKGVINVESALQ

SEQ ID NO: 69784 - protein, 275 aa, Bacillus sp. LG1
AQTVPWGIPHIKADKAHAAGVTGSGVKVAILDTGIDANHADLNVKGGASFVSGEPNALQDGNGHGTHVAGTVAALNNTTGVLGVAYNADLYAVKVLSASGSGTLSGIAQGIEWSISNGMNVINMSLGGSSGSTALQQACNNAYNRGIVVIAAAGNSGSSGNRNTMGYPARYSSVIAVGAVSSNNTRASFSSVGSELEVMAPGVNILSTTPGNNYASFNGTSMAAPHVAGAAALIKAIYPSMTNVQIRERLKNTATNLGDPFFYGKGVINVESALQ

SEQ ID NO: 69785 - protein, 275 aa, Bacillus sp. LG1
AQTVPWGIPHIKADKAHAAGVTGSGVKVAILDTGIDANHADLNVKGGASFVSGEPNALQDGNGHGTHVAGTVAALNNTTGVLGVAYNADLYAVLVLSASGSGTLSGIAQGIEWSISNGMNVINMSLGGSSGSTALQQACNNAYNRGIVVIAAAGNSGSSGNRNTMGYPARYSSVIAVGAVSSNNTRASFSSVGSELEVMAPGVNILSTTPGNNYASFNGTSMAAPHVAGAAALIKAKYPSMTNVQIRERLKNTATNLGDPFFYGKGVINVESALQ

SEQ ID NO: 69786 - protein, 275 aa, Bacillus sp. LG1
AQTVPWGIPHIKADKAHAAGVTGSGVKVAILDTGIDANHADLNVKGGASFVSGEPNALQDGNGHGTHVAGTVAAQNNTTGVLGVAYNADLYAVKVLSASGSGTLSGIAQGIEWSISNGMNVINMSLGGSSGSTALQQACNNAYNRGIVVIAAAGNSGSSGNRNTMGYPARYSSVIAVGAVSSNNTRASFSSVGSELEVMAPGVNILSTTPGNNYASFNGTSMAAPHVAGAAALIKAKYPSMTNVQIRERLKNTATNLGDPFFYGKGVINVESALQ

SEQ ID NO: 69787 - protein, 275 aa, Bacillus sp. LG1
AQTVPWGIPHIKADKAHAAGVTGSGVKVAILDTGIDANHADLNVKGGASFVSGEPNALQDGNGHGTHVAGTQAALNNTTGVLGVAYNADLYAVKVLSASGSGTLSGIAQGIEWSISNGMNVINMSLGGSSGSTALQQACNNAYNRGIVVIAAAGNSGSSGNRNTMGYPARYSSVIAVGAVSSNNTRASFSSVGSELEVMAPGVNILSTTPGNNYASFNGTSMAAPHVAGAAALIKAKYPSMTNVQIRERLKNTATNLGDPFFYGKGVINVESALQ

SEQ ID NO: 69788 - protein, 275 aa, Bacillus sp. LG1
AQTVPWGIPHIKADKAHAAGVTGSGVKVAILDTGIDANHADLNVKGGASFVSGEPNALQDGNGHGTHVAGTVAALNNTTGVLGVAYNADLYAVKVLSASGSGTLSGIAQGIEWSISNGMNVINMSLGGSSGSTALQQACNNAYNRGIVVIAAAGNSGSSGFRNTMGYPARYSSVIAVGAVSSNNTRASFSSVGSELEVMAPGVNILSTTPGNNYASFNGTSMAAPHVAGAAALIKAKYPSMTNVQIRERLKNTATNLGDPFFYGKGVINVESALQ

SEQ ID NO: 69789 - protein, 275 aa, Bacillus sp. LG1
AQTVPWGIPHIKADKAHAAGVTGSGVKVAILDTGIDANSADLNVKGGASFVSGEPNALQDGNGHGTHVAGTVAALNNTTGVLGVAYNADLYAVKVLSASGSGTLSGIAQGIEWSISNGMNVINMSLGGSSGSTALQQACNNAYNRGIVVIAAAGNSGSSGNRNTMGYPARYSSVIAVGAVSSNNTRASFSSVGSELEVMAPGVNILSTTPGNNYASFNGTSMAAPHVAGAAALIKAKYPSMTNVQIRERLKNTATNLGDPFFYGKGVINVESALQ

SEQ ID NO: 69790 - protein, 275 aa, Bacillus sp. LG1
AQTVPWGIPHIKADKAHAAGVTGSGVKVAILDTGIDANHADLNVKGGASFVSGEPNALQDGNGHGTHVAGTVAALNNTTGVLGVAYNADLYAVKVLSASGSGTLSGIAQGIEWSISNGMNVINMSLGGSSESTALQQACNNAYNRGIVVIAAAGNSGSSGNRNTMGYPARYSSVIAVGAVSSNNTRASFSSVGSELEVMAPGVNILSTTPGNNYASFNGTSMAAPHVAGAAALIKAKYPSMTNVQIRERLKNTATNLGDPFFYGKGVINVESALQ

SEQ ID NO: 69791 - protein, 275 aa, Bacillus sp. LG1
AQTVPWGIPHIKADKAHAAGVTGSGVKVAILDTGIDANHADLNVKGGASFVSGEPNALQDGNGHGTHVAGTVAALNNTTGVLGVAYNADLYAVKVLSASGSGTLSGIAQGIEWSISNGMNVINMSLGGSSGSTALQQACNNAYNRGIVVIAAAGNSGSSGNRNTMGYPARYSSVIAVGAVSSNNTRASFSSVGSELEVMAPGVNILSTTPGNNYASFNGTSMAAPHVAGDAALIKAKYPSMTNVQIRERLKNTATNLGDPFFYGKGVINVESALQ

SEQ ID NO: 69792 - protein, 275 aa, Bacillus sp. LG1
AQTVPWGIPHIKADKAHAAGVTGSGVKVAILDTGIDANHADLNVKGGASFDSGEPNALQDGNGHGTHVAGTVAALNNTTGVLGVAYNADLYAVKVLSASGSGTLSGIAQGIEWSISNGMNVINMSLGGSSGSTALQQACNNAYNRGIVVIAAAGNSGSSGNRNTMGYPARYSSVIAVGAVSSNNTRASFSSVGSELEVMAPGVNILSTTPGNNYASFNGTSMAAPHVAGAAALIKAKYPSMTNVQIRERLKNTATNLGDPFFYGKGVINVESALQ

SEQ ID NO: 69793 - protein, 275 aa, Bacillus sp. LG1
AQTVPWGIPHIKADKAHPAGVTGSGVKVAILDTGIDANHADLNVKGGASFVSGEPNALQDGNGHGTHVAGTVAALNNTTGVLGVAYNADLYAVKVLSASGSGTLSGIAQGIEWSISNGMNVINMSLGGSSGSTALQQACNNAYNRGIVVIAAAGNSGSSGNRNTMGYPARYSSVIAVGAVSSNNTRASFSSVGSELEVMAPGVNILSTTPGNNYASFNGTSMAAPHVAGAAALIKAKYPSMTNVQIRERLKNTATNLGDPFFYGKGVINVESALQ

SEQ ID NO: 69794 - protein, 275 aa, Bacillus sp. LG1
AQTVPWGIPHIKADKAHAAGVTGSGVKVAILDTGIDANHADLNVKGGASFVSGEPNALQDGNGHGTHVAGTVAALNNTTGVLGVAYNADLYAVKVLSASGSGTLSGIAQGIEWSISNGMNVINMSLGGSSGSTALQQACNNAYNRGIVVIAAAGNSGSSGNRNTMTYPARYSSVIAVGAVSSNNTRASFSSVGSELEVMAPGVNILSTTPGNNYASFNGTSMAAPHVAGAAALIKAKYPSMTNVQIRERLKNTATNLGDPFFYGKGVINVESALQ

SEQ ID NO: 69795 - protein, 275 aa, Bacillus sp. LG1
AQTVPWGIPHIKADKAHAAGVTGSGVKVAILDTGIDANHADLNVKGGASFVSGEPNALQDGNGHGTHVAGAVAALNNTTGVLGVAYNADLYAVKVLSASGSGTLSGIAQGIEWSISNGMNVINMSLGGSSGSTALQQACNNAYNRGIVVIAAAGNSGSSGNRNTMGYPARYSSVIAVGAVSSNNTRASFSSVGSELEVMAPGVNILSTTPGNNYASFNGTSMAAPHVAGAAALIKAKYPSMTNVQIRERLKNTATNLGDPFFYGKGVINVESALQ

SEQ ID NO: 69796 - protein, 275 aa, Bacillus sp. LG1
AQTVPWGIPHIKADKAHAAGVTGSGVKVAILDTGIDANHADLNVKGGASFVSGEPNALQDGNGHGTHVAGTVAALNNTTGVLGVAYNADLYAVKVLSASGSGTLSGIAQGIEWSISNGMNVINMSLGGSSGSTALQQACNNAYNRNIVVIAAAGNSGSSGNRNTMGYPARYSSVIAVGAVSSNNTRASFSSVGSELEVMAPGVNILSTTPGNNYASFNGTSMAAPHVAGAAALIKAKYPSMTNVQIRERLKNTATNLGDPFFYGKGVINVESALQ

SEQ ID NO: 69797 - protein, 275 aa, Bacillus sp. LG1
AQTVPWGIPHIKADKAHAAGVTGSGVKVAILDTGIDANHADLNVKGGASFVSGEPNALQDGNGHGTHVAGTVAALNNTTGVLGVAYNADLYAVKVLSASGSGTLSGIAQGIEWSISNGMNVINMSLGGSSGSTALQQACNNAYNRGIVVIAAAGNSGSSGNRNTMGYPSRYSSVIAVGAVSSNNTRASFSSVGSELEVMAPGVNILSTTPGNNYASFNGTSMAAPHVAGAAALIKAKYPSMTNVQIRERLKNTATNLGDPFFYGKGVINVESALQ

SEQ ID NO: 69798 - protein, 275 aa, Bacillus sp. LG1
AQTVPWGIPHIKADKAHAAGVTGSGVKVAILDTGIDANHADLNVKGGADFVSGEPNALQDGNGHGTHVAGTVAALNNTTGVLGVAYNADLYAVKVLSASGSGTLSGIAQGIEWSISNGMNVINMSLGGSSGSTALQQACNNAYNRGIVVIAAAGNSGSSGNRNTMGYPARYSSVIAVGAVSSNNTRASFSSVGSELEVMAPGVNILSTTPGNNYASFNGTSMAAPHVAGAAALIKAKYPSMTNVQIRERLKNTATNLGDPFFYGKGVINVESALQ

SEQ ID NO: 69799 - protein, 275 aa, Bacillus sp. LG1
AQTVPWGIPHIKADKAHAAGVTGSGVKVAILDTGIDANHADLNVKGGASFVSGEPNALQDGNGHGTHVAGTVAALNNTTGVLGVAYNADLYAVKVLSASGSGTLSGIAQGIEWSISNGMNVINMSLGGSSGSTALQQACNNAYNRGIVVITAAGNSGSSGNRNTMGYPARYSSVIAVGAVSSNNTRASFSSVGSELEVMAPGVNILSTTPGNNYASFNGTSMAAPHVAGAAALIKAKYPSMTNVQIRERLKNTATNLGDPFFYGKGVINVESALQ

SEQ ID NO: 69800 - protein, 275 aa, Bacillus sp. LG1
AQTVPWGIPHIKADKAHQAGVTGSGVKVAILDTGIDANHADLNVKGGASFVSGEPNALQDGNGHGTHVAGTVAALNNTTGVLGVAYNADLYAVKVLSASGSGTLSGIAQGIEWSISNGMNVINMSLGGSSGSTALQQACNNAYNRGIVVIAAAGNSGSSGNRNTMGYPARYSSVIAVGAVSSNNTRASFSSVGSELEVMAPGVNILSTTPGNNYASFNGTSMAAPHVAGAAALIKAKYPSMTNVQIRERLKNTATNLGDPFFYGKGVINVESALQ

SEQ ID NO: 69801 - protein, 275 aa, Bacillus sp. LG1
AQTVPWNIPHIKADKAHAAGVTGSGVKVAILDTGIDANHADLNVKGGASFVSGEPNALQDGNGHGTHVAGTVAALNNTTGVLGVAYNADLYAVKVLSASGSGTLSGIAQGIEWSISNGMNVINMSLGGSSGSTALQQACNNAYNRGIVVIAAAGNSGSSGNRNTMGYPARYSSVIAVGAVSSNNTRASFSSVGSELEVMAPGVNILSTTPGNNYASFNGTSMAAPHVAGAAALIKAKYPSMTNVQIRERLKNTATNLGDPFFYGKGVINVESALQ

SEQ ID NO: 69802 - protein, 275 aa, Bacillus sp. LG1
AQTVPWGIPHIKADKAHAAGVTGSGVKVAILDTGIDANHADLNVKGGASFVSGEPNALQDGNGHGTHVAGTVAALNNTTGVLGVAYNADLYAVKVLSASGSGTLSGIAQGIEWSISNGMNVINMSLGGSSGSTALQQACNNAYNRGIVVIAAAGNSGSSGNRNTMGYPARYSSVIAVGAVSSNNTRASFSSVGSELEVMAPGVNILSTTPGNNYASFNGTSMAAPHVAGAAALIKAKYPSMTNVAIRERLKNTATNLGDPFFYGKGVINVESALQ

SEQ ID NO: 69803 - protein, 275 aa, Bacillus sp. LG1
AQTVPWGIPHIKADKAHAAGVTGSGVKVAILDTGIDANHADLNVKGGASFVSGKPNALQDGNGHGTHVAGTVAALNNTTGVLGVAYNADLYAVKVLSASGSGTLSGIAQGIEWSISNGMNVINMSLGGSSGSTALQQACNNAYNRGIVVIAAAGNSGSSGNRNTMGYPARYSSVIAVGAVSSNNTRASFSSVGSELEVMAPGVNILSTTPGNNYASFNGTSMAAPHVAGAAALIKAKYPSMTNVQIRERLKNTATNLGDPFFYGKGVINVESALQ

SEQ ID NO: 69804 - protein, 275 aa, Bacillus sp. LG1
APTVPWGIPHIKADKAHAAGVTGSGVKVAILDTGIDANHADLNVKGGASFVSGEPNALQDGNGHGTHVAGTVAALNNTTGVLGVAYNADLYAVKVLSASGSGTLSGIAQGIEWSISNGMNVINMSLGGSSGSTALQQACNNAYNRGIVVIAAAGNSGSSGNRNTMGYPARYSSVIAVGAVSSNNTRASFSSVGSELEVMAPGVNILSTTPGNNYASFNGTSMAAPHVAGAAALIKAKYPSMTNVQIRERLKNTATNLGDPFFYGKGVINVESALQ

SEQ ID NO: 69805 - protein, 275 aa, Bacillus sp. LG1
AQTVPWGIPHIKADKAHAAGVTGSGVKVAILDTGIDANHADLNVKGGASFVSGEPNALQDGNGHGTHVAGTVAALNNTTGVLGVAYNADLYAVKVLSASGSGTLSGIAQGIEWSISNGMNVINSSLGGSSGSTALQQACNNAYNRGIVVIAAAGNSGSSGNRNTMGYPARYSSVIAVGAVSSNNTRASFSSVGSELEVMAPGVNILSTTPGNNYASFNGTSMAAPHVAGAAALIKAKYPSMTNVQIRERLKNTATNLGDPFFYGKGVINVESALQ

SEQ ID NO: 69806 - protein, 275 aa, Bacillus sp. LG1
AQTVPWGIPHIKADKAHAAGVTGSGVKVAILDTGIDANHADLNVKGGASFVSGEPNALQDGNGHGTEVAGTVAALNNTTGVLGVAYNADLYAVKVLSASGSGTLSGIAQGIEWSISNGMNVINMSLGGSSGSTALQQACNNAYNRGIVVIAAAGNSGSSGNRNTMGYPARYSSVIAVGAVSSNNTRASFSSVGSELEVMAPGVNILSTTPGNNYASFNGTSMAAPHVAGAAALIKAKYPSMTNVQIRERLKNTATNLGDPFFYGKGVINVESALQ

SEQ ID NO: 69807 - protein, 275 aa, Bacillus sp. LG1
AQTVPWGIRHIKADKAHAAGVTGSGVKVAILDTGIDANHADLNVKGGASFVSGEPNALQDGNGHGTHVAGTVAALNNTTGVLGVAYNADLYAVKVLSASGSGTLSGIAQGIEWSISNGMNVINMSLGGSSGSTALQQACNNAYNRGIVVIAAAGNSGSSGNRNTMGYPARYSSVIAVGAVSSNNTRASFSSVGSELEVMAPGVNILSTTPGNNYASFNGTSMAAPHVAGAAALIKAKYPSMTNVQIRERLKNTATNLGDPFFYGKGVINVESALQ

SEQ ID NO: 69808 - protein, 275 aa, Bacillus sp. LG1
AQTVPWGIPHIKADKAHAAGVTGSGVKVAILDTGIDANHADLNVKGGASFVSGEPNALQDGNGHGTHVAGTVAALNNTTGVLGVAYNADLYAVKVLSASGSGTLSGIAQGIEWSISNGMNVINMSLGGSSGSTALQQACNNAYNRGIVVIAAAGNSGNSGNRNTMGYPARYSSVIAVGAVSSNNTRASFSSVGSELEVMAPGVNILSTTPGNNYASFNGTSMAAPHVAGAAALIKAKYPSMTNVQIRERLKNTATNLGDPFFYGKGVINVESALQ

SEQ ID NO: 69809 - protein, 275 aa, Bacillus sp. LG1
AQTVPWGIPHIKADKAHAAGVTGSGNKVAILDTGIDANHADLNVKGGASFVSGEPNALQDGNGHGTHVAGTVAALNNTTGVLGVAYNADLYAVKVLSASGSGTLSGIAQGIEWSISNGMNVINMSLGGSSGSTALQQACNNAYNRGIVVIAAAGNSGSSGNRNTMGYPARYSSVIAVGAVSSNNTRASFSSVGSELEVMAPGVNILSTTPGNNYASFNGTSMAAPHVAGAAALIKAKYPSMTNVQIRERLKNTATNLGDPFFYGKGVINVESALQ

SEQ ID NO: 69810 - protein, 275 aa, Bacillus sp. LG1
AQTVPWGIPHIKADKAHAAGVTGSGVKVAILDTGIDANHADLNVKGGASFQSGEPNALQDGNGHGTHVAGTVAALNNTTGVLGVAYNADLYAVKVLSASGSGTLSGIAQGIEWSISNGMNVINMSLGGSSGSTALQQACNNAYNRGIVVIAAAGNSGSSGNRNTMGYPARYSSVIAVGAVSSNNTRASFSSVGSELEVMAPGVNILSTTPGNNYASFNGTSMAAPHVAGAAALIKAKYPSMTNVQIRERLKNTATNLGDPFFYGKGVINVESALQ

SEQ ID NO: 69811 - protein, 275 aa, Bacillus sp. LG1
AQTVPWGPPHIKADKAHAAGVTGSGVKVAILDTGIDANHADLNVKGGASFVSGEPNALQDGNGHGTHVAGTVAALNNTTGVLGVAYNADLYAVKVLSASGSGTLSGIAQGIEWSISNGMNVINMSLGGSSGSTALQQACNNAYNRGIVVIAAAGNSGSSGNRNTMGYPARYSSVIAVGAVSSNNTRASFSSVGSELEVMAPGVNILSTTPGNNYASFNGTSMAAPHVAGAAALIKAKYPSMTNVQIRERLKNTATNLGDPFFYGKGVINVESALQ

SEQ ID NO: 69812 - protein, 275 aa, Bacillus sp. LG1
AQTVPWGIPHIKADKAHAAGVTGSGVKVAILDTGIDANHADLNVKGGASFVSGEPNALQDGNGHGTHVAGTVAALNNTTGVLGVAYNADLYAVKVLSASGSGTLSGIAQGIEWSISNGMNVINMSLGGSSGSTALQQACNNAYNRGIVVIAAAGNSGSSGNRNTMGYPARYSSVIAVGAVSSNNTRASFSSVGSELEVMAPGVNILSTTPGNNYASFNGTSMAAPHVAGAAALIKAKYPSMTNVQIRERLKNTATNAGDPFFYGKGVINVESALQ

SEQ ID NO: 69813 - protein, 275 aa, Bacillus sp. LG1
AQTVPWGIPHIKADKAHAAGVTGSGVKVAILDTGIDANHADLNVKGGASFVSGEPNALQDGNGHGTHVAGTVAALNNTTGVLGVAYNADLYAVKVLSASGSGTLSGIAQGIEWSISNGMNVINMSLGGSSGSLALQQACNNAYNRGIVVIAAAGNSGSSGNRNTMGYPARYSSVIAVGAVSSNNTRASFSSVGSELEVMAPGVNILSTTPGNNYASFNGTSMAAPHVAGAAALIKAKYPSMTNVQIRERLKNTATNLGDPFFYGKGVINVESALQ

SEQ ID NO: 69814 - protein, 275 aa, Bacillus sp. LG1
AQTVPWGIPHIKADKAHTAGVTGSGVKVAILDTGIDANHADLNVKGGASFVSGEPNALQDGNGHGTHVAGTVAALNNTTGVLGVAYNADLYAVKVLSASGSGTLSGIAQGIEWSISNGMNVINMSLGGSSGSTALQQACNNAYNRGIVVIAAAGNSGSSGNRNTMGYPARYSSVIAVGAVSSNNTRASFSSVGSELEVMAPGVNILSTTPGNNYASFNGTSMAAPHVAGAAALIKAKYPSMTNVQIRERLKNTATNLGDPFFYGKGVINVESALQ

SEQ ID NO: 69815 - protein, 275 aa, Synthetic construct
AQVVPWGIPHIKADKAHASGVTGSGVKVAVLDTGIDANHADLNVKGGASFVSGEPNALQDGNGHGTHVAGTVAALDNTTGVLGVAYNAFLYAVKVLGASGSGTLSGIAQGIEWSIANDMDVINMSLGISTGSTALQQACNNAYASGIVVVAAAGNSGSNGKRNTMGYPARYSSVIAVGAVDSSNNRASFSSVGSELEVMAPGVSILSTTPGNNYESFNGTSMASPHVAGAAALIKAKYPSMTNVQIRNKLKNTATNLGPAFYYGHGVINVEKALQ

SEQ ID NO: 69816 - protein, 275 aa, Bacillus sp. LG1
AQTVPWGIPHIKADKAHAATVTGSGVKVAILDTGIDANHADLNVKGGASFVSGEPNALQDGNGHGTHVAGTVAALNNTTGVLGVAYNADLYAVKVLSASGSGTLSGIAQGIEWSISNGMNVINMSLGGSSGSTALQQACNNAYNRGIVVIAAAGNSGSSGNRNTMGYPARYSSVIAVGAVSSNNTRASFSSVGSELEVMAPGVNILSTTPGNNYASFNGTSMAAPHVAGAAALIKAKYPSMTNVQIRERLKNTATNLGDPFFYGKGVINVESALQ

SEQ ID NO: 69817 - protein, 275 aa, Bacillus sp. LG1
AQTVPWGIPHIKADKAHAAGVTGSGVKVAILDTGIDANHADLNVKGGASFVSGEPNALQDGNGHGTHVAGTVAALNNTTGVLGVAYNADLYAVKVLSASGSGTLSGIAQGIEWSISNGMNVINMSLGGSSGSTALQQACNNAYNRGIVVIAAAGNSGSSGNRNTMGYPARYSSVIAVGAVSSNNTRASFSSVGSELEVMAPGVNILSTTPGNNYASFNGTSMAAPHVAGAAALIKAKYESMTNVQIRERLKNTATNLGDPFFYGKGVINVESALQ

SEQ ID NO: 69818 - protein, 275 aa, Bacillus sp. LG1
AQTVPWGIPHIKADKAHAAGVTGSGVKVAILDTGIDANHADLNVKGGASFVSGEPNALQDGNGHGTHVAGTVAALNNTTGVLGVAYNADLYAVKVLSASGSGTLSGIAQGIEWSISNGMNVINMSLGGSSGSTALQQACNNAYNRGIVVIAAAGNSGSSGNRNTMGYPARYSSVIAVGAVSSNNTRASGSSVGSELEVMAPGVNILSTTPGNNYASFNGTSMAAPHVAGAAALIKAKYPSMTNVQIRERLKNTATNLGDPFFYGKGVINVESALQ

SEQ ID NO: 69819 - protein, 275 aa, Bacillus sp. LG1
AQTVIWGIPHIKADKAHAAGVTGSGVKVAILDTGIDANHADLNVKGGASFVSGEPNALQDGNGHGTHVAGTVAALNNTTGVLGVAYNADLYAVKVLSASGSGTLSGIAQGIEWSISNGMNVINMSLGGSSGSTALQQACNNAYNRGIVVIAAAGNSGSSGNRNTMGYPARYSSVIAVGAVSSNNTRASFSSVGSELEVMAPGVNILSTTPGNNYASFNGTSMAAPHVAGAAALIKAKYPSMTNVQIRERLKNTATNLGDPFFYGKGVINVESALQ

SEQ ID NO: 69820 - protein, 275 aa, Bacillus sp. LG1
AQTVPWGIPHIKADKAHAAGVTGSGVKVAILDTGIDANHADLNVKGGASFVSGEPNALQDGNGHGTHVAGTVAALNNTTGVLGVAYNADLYAVKVLSASGSGTLSGIAQGIEWSISNRMNVINMSLGGSSGSTALQQACNNAYNRGIVVIAAAGNSGSSGNRNTMGYPARYSSVIAVGAVSSNNTRASFSSVGSELEVMAPGVNILSTTPGNNYASFNGTSMAAPHVAGAAALIKAKYPSMTNVQIRERLKNTATNLGDPFFYGKGVINVESALQ

SEQ ID NO: 69821 - protein, 275 aa, Bacillus sp. LG1
AQTVPWGIPHIKADKAHAAGVTGSGVKVAILDTGIDANHADLNVKGGASFVSGEPNALQDGNGHGTHVAGTVAALNNTTGVLGVAYNADLYAVKVLSASGSGTLSGIAQGIEWSISNGMNVINMSLGGSSGSTALQQACNNAYNRGIVVIAAAHNSGSSGNRNTMGYPARYSSVIAVGAVSSNNTRASFSSVGSELEVMAPGVNILSTTPGNNYASFNGTSMAAPHVAGAAALIKAKYPSMTNVQIRERLKNTATNLGDPFFYGKGVINVESALQ

SEQ ID NO: 69822 - protein, 275 aa, Bacillus sp. LG1
AQTVPWGIPHIKADKAHAAGVTGSGVKVAILDTGIDANHADLNVKGGASFVSGSPNALQDGNGHGTHVAGTVAALNNTTGVLGVAYNADLYAVKVLSASGSGTLSGIAQGIEWSISNGMNVINMSLGGSSGSTALQQACNNAYNRGIVVIAAAGNSGSSGNRNTMGYPARYSSVIAVGAVSSNNTRASFSSVGSELEVMAPGVNILSTTPGNNYASFNGTSMAAPHVAGAAALIKAKYPSMTNVQIRERLKNTATNLGDPFFYGKGVINVESALQ

SEQ ID NO: 69823 - protein, 275 aa, Bacillus sp. LG1
AQTVPWGIPHIKADKAHAAGVTGSGVKVAILDTGIDANHADLNVKGGASFVSGEPNALQDGNGHGTHVAGTVAALNNTTGVLGVAYNADLYAVKVLSASGSGTLSGIAQGIEWSISNGMNVINMSLGGSSGSTALQQACNNAYNRGIVVIAAAGNSGSSGNRNTMGYPARYSSVIAVGAVSSNNTRFSFSSVGSELEVMAPGVNILSTTPGNNYASFNGTSMAAPHVAGAAALIKAKYPSMTNVQIRERLKNTATNLGDPFFYGKGVINVESALQ

SEQ ID NO: 69824 - protein, 275 aa, Bacillus sp. LG1
AQTVPWGIPHIKADKAHAAGVTGSGVKVAILDTGIDANHADLNVKGGASFVSGEPNALQDGNGHGTHVAGTVAAHNNTTGVLGVAYNADLYAVKVLSASGSGTLSGIAQGIEWSISNGMNVINMSLGGSSGSTALQQACNNAYNRGIVVIAAAGNSGSSGNRNTMGYPARYSSVIAVGAVSSNNTRASFSSVGSELEVMAPGVNILSTTPGNNYASFNGTSMAAPHVAGAAALIKAKYPSMTNVQIRERLKNTATNLGDPFFYGKGVINVESALQ

SEQ ID NO: 69825 - protein, 275 aa, Bacillus sp. LG1
AQTVPWGIPHIKADKAHAAGVTGSGVKVAILDTGIDANHADLNVKGGASFVSGEPNALQDGNGHGTHVAGTVAALNNTTGVLGVAYNADLYAVKVLSASGSGTLSGIAQGIEWSISNGMNVINMSLGGSSGSTALQQACNNAYNRGIVVIAAAGNSGSSGNRNTMGYPARYSSVIAVGAVSSNNTRASFSSVGSELEVMAPGVNILSTTVGNNYASFNGTSMAAPHVAGAAALIKAKYPSMTNVQIRERLKNTATNLGDPFFYGKGVINVESALQ

SEQ ID NO: 69826 - protein, 275 aa, Bacillus sp. LG1
AQTVPWGIPHIKADKAHAAGVTGSGVKVAILDTGIDANHADLNVKGGASFVSGEPNALQDGNGHGTHVAGTVAAGNNTTGVLGVAYNADLYAVKVLSASGSGTLSGIAQGIEWSISNGMNVINMSLGGSSGSTALQQACNNAYNRGIVVIAAAGNSGSSGNRNTMGYPARYSSVIAVGAVSSNNTRASFSSVGSELEVMAPGVNILSTTPGNNYASFNGTSMAAPHVAGAAALIKAKYPSMTNVQIRERLKNTATNLGDPFFYGKGVINVESALQ

SEQ ID NO: 69827 - protein, 275 aa, Bacillus sp. LG1
AQTVPWGIPHIKADKAHAAGVTGSGVKVAILDTGIDRNHADLNVKGGASFVSGEPNALQDGNGHGTHVAGTVAALNNTTGVLGVAYNADLYAVKVLSASGSGTLSGIAQGIEWSISNGMNVINMSLGGSSGSTALQQACNNAYNRGIVVIAAAGNSGSSGNRNTMGYPARYSSVIAVGAVSSNNTRASFSSVGSELEVMAPGVNILSTTPGNNYASFNGTSMAAPHVAGAAALIKAKYPSMTNVQIRERLKNTATNLGDPFFYGKGVINVESALQ

SEQ ID NO: 69828 - protein, 275 aa, Bacillus sp. LG1
AQTVPWGIPHIKADKAHAAGVTGSGVKVAILDTGIDANHADLNVKGGASFVSGEPNALQDGNGHGTHVAGTVAALNNTTGVLGVAYNADLYAVKVLSASGSGTLSGIAQGIEWSISNGMNVINMSLGGSSGSTALQQACNNAYNRGIVVIAAAGNSGSSGNRNTMGYPARYSSVIAVGAVSSNNTRASFSSVGSELEVMAPGVNILSTTPGNNYASFNGTSMAAPHVAGAAALIKAKYPSMTNVQIRERMKNTATNLGDPFFYGKGVINVESALQ

SEQ ID NO: 69829 - protein, 275 aa, Bacillus sp. LG1
AQTVPWGIPHIKADKAHAAGVTGSGVKVAILDTGIDANHADLNVKGGASFVSGEPNALQDGNGHGTHVAGTVAALNNTTGVLGVAYNADLYAVKVLSASGSGTLSGIAQGIEWSISNGMNVINMSLGGSSGSTALQQACNNAYNRGIVVIAAAGNSGSSGNRNTMGYPARYSSVIAVGAVSSNNTRASFSSVGSELEVMSPGVNILSTTPGNNYASFNGTSMAAPHVAGAAALIKAKYPSMTNVQIRERLKNTATNLGDPFFYGKGVINVESALQ

SEQ ID NO: 69830 - protein, 275 aa, Bacillus sp. LG1
AQTVPWGIPHIKADKAHAAGVTGSGVKVAILDTGIDANHADLNVKGGASFVSGEPNALQDGNGHGTHVAGTVAALNNTTGVLGVAYNADLYAVKVLSASGSGTLSGIAQGIEWSISNGMNVINMSLGGSSGSTALQQACNNAYNRGIVVIAAAGNSGSSGNRNTMGYPARYSSVIAVGAASSNNTRASFSSVGSELEVMAPGVNILSTTPGNNYASFNGTSMAAPHVAGAAALIKAKYPSMTNVQIRERLKNTATNLGDPFFYGKGVINVESALQ

SEQ ID NO: 69831 - protein, 275 aa, Bacillus sp. LG1
AQTVPWGIPHIKADKAHAAGVTGSGVKVAILDTGIDANHADLNVKGGASFVSGEPNALQAGNGHGTHVAGTVAALNNTTGVLGVAYNADLYAVKVLSASGSGTLSGIAQGIEWSISNGMNVINMSLGGSSGSTALQQACNNAYNRGIVVIAAAGNSGSSGNRNTMGYPARYSSVIAVGAVSSNNTRASFSSVGSELEVMAPGVNILSTTPGNNYASFNGTSMAAPHVAGAAALIKAKYPSMTNVQIRERLKNTATNLGDPFFYGKGVINVESALQ

SEQ ID NO: 69832 - protein, 275 aa, Bacillus sp. LG1
AQTVPWGIPHIKADHAHAAGVTGSGVKVAILDTGIDANHADLNVKGGASFVSGEPNALQDGNGHGTHVAGTVAALNNTTGVLGVAYNADLYAVKVLSASGSGTLSGIAQGIEWSISNGMNVINMSLGGSSGSTALQQACNNAYNRGIVVIAAAGNSGSSGNRNTMGYPARYSSVIAVGAVSSNNTRASFSSVGSELEVMAPGVNILSTTPGNNYASFNGTSMAAPHVAGAAALIKAKYPSMTNVQIRERLKNTATNLGDPFFYGKGVINVESALQ

SEQ ID NO: 69833 - protein, 275 aa, Bacillus sp. LG1
AQTVPWGIPHIKADKAHWAGVTGSGVKVAILDTGIDANHADLNVKGGASFVSGEPNALQDGNGHGTHVAGTVAALNNTTGVLGVAYNADLYAVKVLSASGSGTLSGIAQGIEWSISNGMNVINMSLGGSSGSTALQQACNNAYNRGIVVIAAAGNSGSSGNRNTMGYPARYSSVIAVGAVSSNNTRASFSSVGSELEVMAPGVNILSTTPGNNYASFNGTSMAAPHVAGAAALIKAKYPSMTNVQIRERLKNTATNLGDPFFYGKGVINVESALQ

SEQ ID NO: 69834 - protein, 275 aa, Bacillus sp. LG1
AQTVPWGIPHIKADKAHAAGVTGSGVKVAILDTGIDANHADLNVKGGYSFVSGEPNALQDGNGHGTHVAGTVAALNNTTGVLGVAYNADLYAVKVLSASGSGTLSGIAQGIEWSISNGMNVINMSLGGSSGSTALQQACNNAYNRGIVVIAAAGNSGSSGNRNTMGYPARYSSVIAVGAVSSNNTRASFSSVGSELEVMAPGVNILSTTPGNNYASFNGTSMAAPHVAGAAALIKAKYPSMTNVQIRERLKNTATNLGDPFFYGKGVINVESALQ

SEQ ID NO: 69835 - protein, 275 aa, Bacillus sp. LG1
AQTVPWGIPHIKADKAHAAGVTGSGVKVAILDTGIDANHADLNVKGGASFVSGEPNALQDGNGHGTHVAGTVAALNNTTGVLGVAYNADYYAVKVLSASGSGTLSGIAQGIEWSISNGMNVINMSLGGSSGSTALQQACNNAYNRGIVVIAAAGNSGSSGNRNTMGYPARYSSVIAVGAVSSNNTRASFSSVGSELEVMAPGVNILSTTPGNNYASFNGTSMAAPHVAGAAALIKAKYPSMTNVQIRERLKNTATNLGDPFFYGKGVINVESALQ

SEQ ID NO: 69836 - protein, 275 aa, Bacillus sp. LG1
AQTVPWGIPHIKADKAHAAGVTGSGVKVAILDTGIDANHADLNVKGGASFVSGEPNALQDGNGHGTHVAGTVAALNNTTGVLGVAYNADLYAVKVLSASGSGTLSGIAQGIEWSISNGMNVINMSLGGSSGSTALQQACNNAYNRGIVVIAAAGNSGSQGNRNTMGYPARYSSVIAVGAVSSNNTRASFSSVGSELEVMAPGVNILSTTPGNNYASFNGTSMAAPHVAGAAALIKAKYPSMTNVQIRERLKNTATNLGDPFFYGKGVINVESALQ

SEQ ID NO: 69837 - protein, 275 aa, Bacillus sp. LG1
AQTVPWGIPHIKADKAHAAGVTGSGVKVAILDTGIDANHADLNVKGGASFVSGEPNALQDGNGHGTHVAGTVAALNNTTGVLGVAYNADLYAVKVLSASGSGTLSGIAQGIEWSISNGMNVINMSLGGSSGSTALQQACNNAYNRGIVEIAAAGNSGSSGNRNTMGYPARYSSVIAVGAVSSNNTRASFSSVGSELEVMAPGVNILSTTPGNNYASFNGTSMAAPHVAGAAALIKAKYPSMTNVQIRERLKNTATNLGDPFFYGKGVINVESALQ

SEQ ID NO: 69838 - protein, 275 aa, Bacillus sp. LG1
AQTVPWGIPHIKAGKAHAAGVTGSGVKVAILDTGIDANHADLNVKGGASFVSGEPNALQDGNGHGTHVAGTVAALNNTTGVLGVAYNADLYAVKVLSASGSGTLSGIAQGIEWSISNGMNVINMSLGGSSGSTALQQACNNAYNRGIVVIAAAGNSGSSGNRNTMGYPARYSSVIAVGAVSSNNTRASFSSVGSELEVMAPGVNILSTTPGNNYASFNGTSMAAPHVAGAAALIKAKYPSMTNVQIRERLKNTATNLGDPFFYGKGVINVESALQ

SEQ ID NO: 69839 - protein, 275 aa, Bacillus sp. LG1
AQTVPWGIPHIKADKAHAAGVTGSGVKVAILDTGIDANHADLNVKGGASFVSGEPNALQDGNGHGTHVAGTVAALNNTTGVLGVAYNADLYAVKVLSASGVGTLSGIAQGIEWSISNGMNVINMSLGGSSGSTALQQACNNAYNRGIVVIAAAGNSGSSGNRNTMGYPARYSSVIAVGAVSSNNTRASFSSVGSELEVMAPGVNILSTTPGNNYASFNGTSMAAPHVAGAAALIKAKYPSMTNVQIRERLKNTATNLGDPFFYGKGVINVESALQ

SEQ ID NO: 69840 - protein, 275 aa, Bacillus sp. LG1
AQTVPWGIPHIKADKAHAAGVTGSGVKVAILDTGIDANHADLNVKGGASFVSGEPNALQDGNGHGTHVAGTVAALNNTTGVLGVAYNADLYAVKVLSASGSGTLSGIAQGIEWSISNGMNVINMSLGGSSGSTALQQACNNAYNRGIVVIAAAGNSGSSGNRNTMGYPARYSSVIAVGAVSSNNTRASFSSVGSELEVMAPGVNILSTTPGNNYASFNGTSMAAPHVAGAAALIKAKYSSMTNVQIRERLKNTATNLGDPFFYGKGVINVESALQ

SEQ ID NO: 69841 - protein, 275 aa, Bacillus sp. LG1
AQTVPWGIPHIKADKAHAAGVTGSGVKVAILDTGIDANHADLNVKGGASFVSGEPNALQDGNGHGTHVAGTVAALNNTTGVLGVAYNADLYAVDVLSASGSGTLSGIAQGIEWSISNGMNVINMSLGGSSGSTALQQACNNAYNRGIVVIAAAGNSGSSGNRNTMGYPARYSSVIAVGAVSSNNTRASFSSVGSELEVMAPGVNILSTTPGNNYASFNGTSMAAPHVAGAAALIKAKYPSMTNVQIRERLKNTATNLGDPFFYGKGVINVESALQ

SEQ ID NO: 69842 - protein, 275 aa, Bacillus sp. LG1
AQTVPWGIPHIKADKAHAAGVTGSGVKVAILDTGIDANHADLNVKGGASFVSGEPNALQDGNGHGTHVAGTVAALNNTTGVLGVAYNADLYAVKVLSASGSGTLSGIAQGIEWSISNGMNVINMSLGGSSGSTALQQACNNAYNRRIVVIAAAGNSGSSGNRNTMGYPARYSSVIAVGAVSSNNTRASFSSVGSELEVMAPGVNILSTTPGNNYASFNGTSMAAPHVAGAAALIKAKYPSMTNVQIRERLKNTATNLGDPFFYGKGVINVESALQ

SEQ ID NO: 69843 - protein, 275 aa, Bacillus sp. LG1
AQTVPWGIPHIKADKAHAAGVTGSGVKVAILDTGIDANHADINVKGGASFVSGEPNALQDGNGHGTHVAGTVAALNNTTGVLGVAYNADLYAVKVLSASGSGTLSGIAQGIEWSISNGMNVINMSLGGSSGSTALQQACNNAYNRGIVVIAAAGNSGSSGNRNTMGYPARYSSVIAVGAVSSNNTRASFSSVGSELEVMAPGVNILSTTPGNNYASFNGTSMAAPHVAGAAALIKAKYPSMTNVQIRERLKNTATNLGDPFFYGKGVINVESALQ

SEQ ID NO: 69844 - protein, 275 aa, Bacillus sp. LG1
AQTVPWGIPHIKADKAHAAGVTGSGVKVAILDTGIDANHADLNVKGGASFVSGEPNALQDGNGHGTHVAGTVAALNNTTGVLGVAYNADLYAVKVLSASGSGTLSGIAQGIEWSISNGMNVINMSLGGSQGSTALQQACNNAYNRGIVVIAAAGNSGSSGNRNTMGYPARYSSVIAVGAVSSNNTRASFSSVGSELEVMAPGVNILSTTPGNNYASFNGTSMAAPHVAGAAALIKAKYPSMTNVQIRERLKNTATNLGDPFFYGKGVINVESALQ

SEQ ID NO: 69845 - protein, 275 aa, Bacillus sp. LG1
AQTVPWGIPHIKADKAHAAGVTGSGVKVAILDTGIDANHADLNVKGGASYVSGEPNALQDGNGHGTHVAGTVAALNNTTGVLGVAYNADLYAVKVLSASGSGTLSGIAQGIEWSISNGMNVINMSLGGSSGSTALQQACNNAYNRGIVVIAAAGNSGSSGNRNTMGYPARYSSVIAVGAVSSNNTRASFSSVGSELEVMAPGVNILSTTPGNNYASFNGTSMAAPHVAGAAALIKAKYPSMTNVQIRERLKNTATNLGDPFFYGKGVINVESALQ

SEQ ID NO: 69846 - protein, 275 aa, Bacillus sp. LG1
AQTVPWGIPHIKADKAHAAGVTGSGVKVAILDTGIDANHADLNVKGGASFVSGEPNALQQGNGHGTHVAGTVAALNNTTGVLGVAYNADLYAVKVLSASGSGTLSGIAQGIEWSISNGMNVINMSLGGSSGSTALQQACNNAYNRGIVVIAAAGNSGSSGNRNTMGYPARYSSVIAVGAVSSNNTRASFSSVGSELEVMAPGVNILSTTPGNNYASFNGTSMAAPHVAGAAALIKAKYPSMTNVQIRERLKNTATNLGDPFFYGKGVINVESALQ

SEQ ID NO: 69847 - protein, 275 aa, Bacillus sp.
AQTVPWGIPHIKADKAHAAGVTGSGVKVAILDTGIDANHADLNVKGGASFVSDEPNALQDGNGHGTHVAGTVAALDNTTGVLGVAYNADLYAVKVLSASGSGTLSGIAQGIEWSISNGMNVINMSLGGSSGSTALQQACNNAYNRGIVVIAAAGNSGSSGNRNTMDYPARYSSVIAVGAVSSNNTRASFSSVGSELEVMAPGVNILSTTPGNNYASFNGTSMAAPHVAGAAALIKAKYPSMTNVQIRERLKNTATNLGDPFFYGKGVINVESALQ

SEQ ID NO: 69848 - protein, 275 aa, Bacillus sp. LG1
AQTVPWGIPHIKADKAHAAGVTGSGVKVAILDTGIDANHADLNVKGGASFVSGEPNALQDGNGHGTHVAGTFAALNNTTGVLGVAYNADLYAVKVLSASGSGTLSGIAQGIEWSISNGMNVINMSLGGSSGSTALQQACNNAYNRGIVVIAAAGNSGSSGNRNTMGYPARYSSVIAVGAVSSNNTRASFSSVGSELEVMAPGVNILSTTPGNNYASFNGTSMAAPHVAGAAALIKAKYPSMTNVQIRERLKNTATNLGDPFFYGKGVINVESALQ

SEQ ID NO: 69849 - protein, 275 aa, Bacillus sp. LG1
AQTVPWGIPHIKADKAHAAGVTGSGVKVAILDTGIDANHADLNVKGGASFVSGEPNALQDGNGHGTHVAGTVAALNNTTGVLGVAYNADLYAVKVLSASGSGTLSGIAQGIEWSISNGMNVINMSLGGSSGSTALQQACNNAYNRGIVVIAAAGNSGSSGNRNTMGYPARYSSVIAVGAVSSNNTRASFSSVGSELEVMAPGVNILSTTPGNNYASFNGTSMAAPHVAGAATLIKAKYPSMTNVQIRERLKNTATNLGDPFFYGKGVINVESALQ

SEQ ID NO: 69850 - protein, 275 aa, Bacillus sp. LG1
AQTVPWGIPHIKADKAHAAGVTGSGEKVAILDTGIDANHADLNVKGGASFVSGEPNALQDGNGHGTHVAGTVAALNNTTGVLGVAYNADLYAVKVLSASGSGTLSGIAQGIEWSISNGMNVINMSLGGSSGSTALQQACNNAYNRGIVVIAAAGNSGSSGNRNTMGYPARYSSVIAVGAVSSNNTRASFSSVGSELEVMAPGVNILSTTPGNNYASFNGTSMAAPHVAGAAALIKAKYPSMTNVQIRERLKNTATNLGDPFFYGKGVINVESALQ

SEQ ID NO: 69851 - protein, 275 aa, Bacillus sp. LG1
AQTVPWGIPHIKADKAHAAGVTGSGVKVAILDTGIDANHADLNVKGGASFVSGEPNALQDGNGHGTHVAGTVAALNNTTGVLGVAYNADLYAVKVLSASGSGTLSGIAQGIEWSISNGMNVINMSLGGSSGSTALQQACNNAYNRGIVVIAAAGNMGSSGNRNTMGYPARYSSVIAVGAVSSNNTRASFSSVGSELEVMAPGVNILSTTPGNNYASFNGTSMAAPHVAGAAALIKAKYPSMTNVQIRERLKNTATNLGDPFFYGKGVINVESALQ

SEQ ID NO: 69852 - protein, 275 aa, Bacillus sp. LG1
AQTVPWGIPHIKADKAHAAGVTGSGVKVAILDTGIDANHADLNVKGGASFVSGEPNALQDGNGHGTHVAGTVAALNNTTGVLGVAYNADLYAVKVLSASGSGTLSGIAQGIEWSISNGMNVINMSLGGSSGSTALQQACNNAYNRGIVVIAAAGNSGSSGNRNTMGYPARYSSVIAVGAVSSNNTRASFSSVGSELEVMAPGVNILSTTPGNNYASFNGTSMAAPHVAGAAALIKAKYPSMTNVQIRERLKNTATNLGDPFFYGKGVINVQSALQ

SEQ ID NO: 69853 - protein, 275 aa, Bacillus sp. LG1
AQTVPWGIPHIKADKAHAAGVTGSGVKVAILDTGIDANHADLNVKGGASFVSGEPNALQDGNGHGTHVAGTVAALNNTTGVLGVAYNADLYAMKVLSASGSGTLSGIAQGIEWSISNGMNVINMSLGGSSGSTALQQACNNAYNRGIVVIAAAGNSGSSGNRNTMGYPARYSSVIAVGAVSSNNTRASFSSVGSELEVMAPGVNILSTTPGNNYASFNGTSMAAPHVAGAAALIKAKYPSMTNVQIRERLKNTATNLGDPFFYGKGVINVESALQ

SEQ ID NO: 69854 - protein, 276 aa, Bacillus amyloliquefaciens
AQSVPYGVSQIKAPALHSQGYTGSNVKVAVIDSGIDSSHPDLKVAGGASMVPSETNPFQDNNSHGTHVAGTVAALNNSIGVLGVAPSASLYAVKVLGSRSGSGQYSWIINGIEWAIANNMDVINMSLGGPSGSAALKAAVDKAVASGVVVVAAAGNEGTSGSSSTVGYPGKYPSVIAVGAVDSSNQRASFSSVGPELDVMAPGVSIQSTLPGNKYGALNGTSMASPHVAGAAALILSKHPNWTNTQVRSSLENTTTKLGDSFYYGKGLINVQAAAQ

SEQ ID NO: 69855 - protein, 275 aa, Bacillus sp. LG1
AQTVPWGIPHIKADKAHAAGVTGSGVKVAILDTGIDANHADLNVKGGASFVSGEPNALQDPNGHGTHVAGTVAALNNTTGVLGVAYNADLYAVKVLSASGSGTLSGIAQGIEWSISNGMNVINMSLGGSSGSTALQQACNNAYNRGIVVIAAAGNSGSSGNRNTMGYPARYSSVIAVGAVSSNNTRASFSSVGSELEVMAPGVNILSTTPGNNYASFNGTSMAAPHVAGAAALIKAKYPSMTNVQIRERLKNTATNLGDPFFYGKGVINVESALQ

SEQ ID NO: 69856 - protein, 275 aa, Bacillus sp. LG1
AQTVPWGIPHIKADKAHAAGVTGSGVKVAILDTGIDANHADLNVKGGASFVSGEPNALQDGNGHGTHVAGTVAALNNTTGVLGVAYNADLYAVKVLSASGSGTLSGIAQGIEWSISNGMNVINMSLGGSSGSTALQQACNNAYNRGIVVIAAAGNSGSSGNRNTMQYPARYSSVIAVGAVSSNNTRASFSSVGSELEVMAPGVNILSTTPGNNYASFNGTSMAAPHVAGAAALIKAKYPSMTNVQIRERLKNTATNLGDPFFYGKGVINVESALQ

SEQ ID NO: 69857 - protein, 275 aa, Bacillus sp. LG1
AQTVPWGIPHIKADKAHAAGVTGSGVKVAILDTGIDANHADLNVKGGASFVSGEPNALQDGNGHGTHVAGTVAALNNTTGVLGVAYNADLYAVKVLSASGSGTLSGIAQGIEWSISNGMNVINMSLGGSSGSTALQQACNNAYNRGIEVIAAAGNSGSSGNRNTMGYPARYSSVIAVGAVSSNNTRASFSSVGSELEVMAPGVNILSTTPGNNYASFNGTSMAAPHVAGAAALIKAKYPSMTNVQIRERLKNTATNLGDPFFYGKGVINVESALQ

SEQ ID NO: 69858 - protein, 275 aa, Bacillus sp. LG1
AQTVPWGIPHIKADKAHAAGVTGSGVKVAILDTGIDANHADLNVKGGASFVSGEPNALQDGNGHGTHVAGTVAALNNTTGVLGVAYNADLYAVKVLSASGSGTLSGIAQGIEWSISNGMNVINMSLGGSSGSTALQQACNNAYNRGIVGIAAAGNSGSSGNRNTMGYPARYSSVIAVGAVSSNNTRASFSSVGSELEVMAPGVNILSTTPGNNYASFNGTSMAAPHVAGAAALIKAKYPSMTNVQIRERLKNTATNLGDPFFYGKGVINVESALQ

SEQ ID NO: 69859 - protein, 275 aa, Bacillus sp. LG1
AQTVPWGIPHIKADKAHAAGVTGSGVKVAILDTGIDANHADLNVKGGASFVSGEPNALQDMNGHGTHVAGTVAALNNTTGVLGVAYNADLYAVKVLSASGSGTLSGIAQGIEWSISNGMNVINMSLGGSSGSTALQQACNNAYNRGIVVIAAAGNSGSSGNRNTMGYPARYSSVIAVGAVSSNNTRASFSSVGSELEVMAPGVNILSTTPGNNYASFNGTSMAAPHVAGAAALIKAKYPSMTNVQIRERLKNTATNLGDPFFYGKGVINVESALQ

SEQ ID NO: 69860 - protein, 275 aa, Bacillus sp. LG1
AQTVPWGIPHIKADKAHAAGVTGSGVKVAILDTGIDANHADLNVKGGASFVSGEPNALQDGNGHGTHVAGTVAALNNTTGVLGVAYNADLYAVKVLSASGSGTLSGIAQGIEWSISNGMNVINMSLGGSSGSTALQQACNNAYNRGIVVIAAAGNSGSSGNRNTMGYPARYSSVIAVGAVSSNNTRASFSSVGSELEVMAPGVNILSTTPGNNYASFNGTSMAAPHVAGAAALIKAKYPSMTNVQIRERLKNTAFNLGDPFFYGKGVINVESALQ

SEQ ID NO: 69861 - protein, 275 aa, Bacillus sp. LG1
AQTVPWGIPHIKADKAHAAGVTGSGVKVAILDTGIDANHADLNVKGGASFVSGEPNALQDGNGHGTHVAGTVAALNNTTGVLGVAYNADLYAVKVLSASGSGTLSGIAQGIEWSISNGMNVINMSLGGSSRSTALQQACNNAYNRGIVVIAAAGNSGSSGNRNTMGYPARYSSVIAVGAVSSNNTRASFSSVGSELEVMAPGVNILSTTPGNNYASFNGTSMAAPHVAGAAALIKAKYPSMTNVQIRERLKNTATNLGDPFFYGKGVINVESALQ

SEQ ID NO: 69862 - protein, 275 aa, Bacillus sp. LG1
AQTVPWGIPHIKADKAHSAGVTGSGVKVAILDTGIDANHADLNVKGGASFVSGEPNALQDGNGHGTHVAGTVAALNNTTGVLGVAYNADLYAVKVLSASGSGTLSGIAQGIEWSISNGMNVINMSLGGSSGSTALQQACNNAYNRGIVVIAAAGNSGSSGNRNTMGYPARYSSVIAVGAVSSNNTRASFSSVGSELEVMAPGVNILSTTPGNNYASFNGTSMAAPHVAGAAALIKAKYPSMTNVQIRERLKNTATNLGDPFFYGKGVINVESALQ

SEQ ID NO: 69863 - protein, 275 aa, Bacillus sp. LG1
AQTVPWGIPHIKADKAHAAGVTGSGVKVAILDTGIDANHADLNVKGGASFVSGEPNALQDGNGHGTHVAGTVAALNNTTGVLGVAYNADNYAVKVLSASGSGTLSGIAQGIEWSISNGMNVINMSLGGSSGSTALQQACNNAYNRGIVVIAAAGNSGSSGNRNTMGYPARYSSVIAVGAVSSNNTRASFSSVGSELEVMAPGVNILSTTPGNNYASFNGTSMAAPHVAGAAALIKAKYPSMTNVQIRERLKNTATNLGDPFFYGKGVINVESALQ

SEQ ID NO: 69864 - protein, 275 aa, Bacillus sp. LG1
AQTVPWGIPHIKADKAHAAGVTGSGVKVAILDTGIDANHADLNVKGGASFVSGEPNALQDGNGHGTHVAGTVAALNNTTGVLGVAYNADLYAVKVLSASGSGTLSGIAQGIEWSISNGMNVINMSLGGSSGSTALQQACNNAYNRGIVVIAAAGNSGVSGNRNTMGYPARYSSVIAVGAVSSNNTRASFSSVGSELEVMAPGVNILSTTPGNNYASFNGTSMAAPHVAGAAALIKAKYPSMTNVQIRERLKNTATNLGDPFFYGKGVINVESALQ

SEQ ID NO: 69865 - protein, 275 aa, Bacillus sp. LG1
AQTVPWGIPHIKADKAHAAGVTGSGVKVAILDTGIDANHADLNVKGGASFVSGEPNALQDGNGHGTHVAGTVAALNNTTGVLGVAYNADLYAVKVLSASGSGTLSGIAQGIEWSISNGMNVINMSLGGSPGSTALQQACNNAYNRGIVVIAAAGNSGSSGNRNTMGYPARYSSVIAVGAVSSNNTRASFSSVGSELEVMAPGVNILSTTPGNNYASFNGTSMAAPHVAGAAALIKAKYPSMTNVQIRERLKNTATNLGDPFFYGKGVINVESALQ

SEQ ID NO: 69866 - protein, 275 aa, Bacillus sp. LG1
AQTVPWGIPHIKADKAHAAGVTGSGVKVAILDTGIDANHADLNVKGGASFVSGEPNALQHGNGHGTHVAGTVAALNNTTGVLGVAYNADLYAVKVLSASGSGTLSGIAQGIEWSISNGMNVINMSLGGSSGSTALQQACNNAYNRGIVVIAAAGNSGSSGNRNTMGYPARYSSVIAVGAVSSNNTRASFSSVGSELEVMAPGVNILSTTPGNNYASFNGTSMAAPHVAGAAALIKAKYPSMTNVQIRERLKNTATNLGDPFFYGKGVINVESALQ

SEQ ID NO: 69867 - protein, 275 aa, Bacillus sp. LG1
AQTVPWGIPHIKADKAHAAGVTGSGVKVAILDTGIDANHADLNVKGGASFVSGEPNALQDGNGHGTHVAGTVAALNNTTGVLGVAYNADLYAVKVLSASGSGTLSGIAQGIEWSISNYMNVINMSLGGSSGSTALQQACNNAYNRGIVVIAAAGNSGSSGNRNTMGYPARYSSVIAVGAVSSNNTRASFSSVGSELEVMAPGVNILSTTPGNNYASFNGTSMAAPHVAGAAALIKAKYPSMTNVQIRERLKNTATNLGDPFFYGKGVINVESALQ

SEQ ID NO: 69868 - protein, 275 aa, Bacillus sp. LG1
AQTVPWGIPHIKADKAHAAGVTGSGVKVAILDTGIDANHADLNVKGGASFVSGEPNALQDGNGHGTHVAGTVAALNNTTGVLGVAYNADLYAVKVLSASGSGTLSGIAQGIEWSISNGMNVINMSLGGSSGSTALQQACNNAYNRGIVVIAAAGNSGSSGNRNTMGYPARYSSVIAVGAVSSNNTRASFSSVGSELEVMAPGVNILSTTPGNNYASFNGTSMAAPHVAGAAMLIKAKYPSMTNVQIRERLKNTATNLGDPFFYGKGVINVESALQ

SEQ ID NO: 69869 - protein, 275 aa, Bacillus sp. LG1
AQTVPWGIPHIKADKAHAAGVTGSGVKVAILDTGIDANHADLNVKGGASFVSGEPNALQDGNGHGTHVAGTVAALNNTTGVLGSAYNADLYAVKVLSASGSGTLSGIAQGIEWSISNGMNVINMSLGGSSGSTALQQACNNAYNRGIVVIAAAGNSGSSGNRNTMGYPARYSSVIAVGAVSSNNTRASFSSVGSELEVMAPGVNILSTTPGNNYASFNGTSMAAPHVAGAAALIKAKYPSMTNVQIRERLKNTATNLGDPFFYGKGVINVESALQ

SEQ ID NO: 69870 - protein, 275 aa, Bacillus sp. LG1
AQTVPWGIPHIKADKAHAAGVTGSGVKVAILDTGIDANHADLNVKGGASFVSGEPNALQDGNGHGTHVAGTVAALNNTTGVLGVAYNADLYAVKVLSASGSGTLSGIAQGIEWSISNGANVINMSLGGSSGSTALQQACNNAYNRGIVVIAAAGNSGSSGNRNTMGYPARYSSVIAVGAVSSNNTRASFSSVGSELEVMAPGVNILSTTPGNNYASFNGTSMAAPHVAGAAALIKAKYPSMTNVQIRERLKNTATNLGDPFFYGKGVINVESALQ

SEQ ID NO: 69871 - protein, 275 aa, Bacillus sp. LG1
AQTVPWGIPHIKADKAHAAGVTGSGVKVAILDTGIDANHADLNVKGGASFVSGEPNALQDGNGHGTHVAGTVAALNNTTGVLGVAYNADLYAVKVLSASGSGTLSGIAQGIEWSISNGMNVINMSLGGSSGSTALQQACNNAYNRGIVVIAAAGNSGSSGNRNTMGYPARYSSVIAVGAVSSNNTRASFSSVGSELEVMALGVNILSTTPGNNYASFNGTSMAAPHVAGAAALIKAKYPSMTNVQIRERLKNTATNLGDPFFYGKGVINVESALQ

SEQ ID NO: 69872 - protein, 275 aa, Bacillus sp. LG1
AQTVPWGIPHIKADKAHAAGVTGSGVKVAILDTGIDANHADLNVKGGASFVSGEPNALQDGNGHGTHVAGTVAALNNTTGVLGVAYNADLYAVKVLSASGSGTLSGIAQGIEWSISNGMNVINMSLGGSSGSTALQQACNNAYNRGIVVIAAAGNSGSSGNRNTMGYPARYSSVIAVGAVSSNNTRASFSSVGSELEVMAPGVNILSTTPGGNYASFNGTSMAAPHVAGAAALIKAKYPSMTNVQIRERLKNTATNLGDPFFYGKGVINVESALQ

SEQ ID NO: 69873 - protein, 275 aa, Bacillus sp. LG1
AQTVPWGIPHIKADKAHAAGVTGSGVKVAILDTGIDANHADLNVKGGASFVSGEPNALQDGNGHGTHVAGTVAALNNTTGVLGVAYNADLYAVKVLSASGSGTLSGIAQGIEWSISNGMNVINMSLGGSSGSTALQQACNNAYNRGIVVIAAAGNSGSSGNRNTMGYPARYSSVIAVGAVSSNNTRASFSSVGSELECMAPGVNILSTTPGNNYASFNGTSMAAPHVAGAAALIKAKYPSMTNVQIRERLKNTATNLGDPFFYGKGVINVESALQ

SEQ ID NO: 69874 - protein, 275 aa, Bacillus sp. LG1
AQTVPWGIPHIKADKAHAAGVTGSGVKVAILDTGIDANHADLNVKGGASFVSGNPNALQDGNGHGTHVAGTVAALNNTTGVLGVAYNADLYAVKVLSASGSGTLSGIAQGIEWSISNGMNVINMSLGGSSGSTALQQACNNAYNRGIVVIAAAGNSGSSGNRNTMGYPARYSSVIAVGAVSSNNTRASFSSVGSELEVMAPGVNILSTTPGNNYASFNGTSMAAPHVAGAAALIKAKYPSMTNVQIRERLKNTATNLGDPFFYGKGVINVESALQ

SEQ ID NO: 69875 - protein, 275 aa, Bacillus sp. LG1
AQTVPWGIPHIKADKAHLAGVTGSGVKVAILDTGIDANHADLNVKGGASFVSGEPNALQDGNGHGTHVAGTVAALNNTTGVLGVAYNADLYAVKVLSASGSGTLSGIAQGIEWSISNGMNVINMSLGGSSGSTALQQACNNAYNRGIVVIAAAGNSGSSGNRNTMGYPARYSSVIAVGAVSSNNTRASFSSVGSELEVMAPGVNILSTTPGNNYASFNGTSMAAPHVAGAAALIKAKYPSMTNVQIRERLKNTATNLGDPFFYGKGVINVESALQ

SEQ ID NO: 69876 - protein, 275 aa, Bacillus sp. LG1
AQTVPWGIPHIKADKAHAAGVTGSGVKVAILDTGIDANHADLNVKGGASFVSGEPNALQDGNGHGTHVAGTVAALNNTTGVLGVAYNADLYAVKVLSASGSGTLSGIAQGIEWSISNGMNVINMSLGGSSGSTALQQACNNAYNRGIVVIAAAGNSGSSGNRNTMGYPARYSNVIAVGAVSSNNTRASFSSVGSELEVMAPGVNILSTTPGNNYASFNGTSMAAPHVAGAAALIKAKYPSMTNVQIRERLKNTATNLGDPFFYGKGVINVESALQ

SEQ ID NO: 69877 - protein, 275 aa, Bacillus sp. LG1
AQTVPWGIPHIKADKAHAAGVTGSGVKVAILDTGIDANHADLNVKGGASFVSGEPNALQDGNGHGTHVAGTVAALNNTTGVLGVAYNADLYAVKVLSASGSGTLSGIAQGIEWSISNGMNVINMSLGGSSGSTALQQACNNAYNRGIVVIIAAGNSGSSGNRNTMGYPARYSSVIAVGAVSSNNTRASFSSVGSELEVMAPGVNILSTTPGNNYASFNGTSMAAPHVAGAAALIKAKYPSMTNVQIRERLKNTATNLGDPFFYGKGVINVESALQ

SEQ ID NO: 69878 - protein, 275 aa, Bacillus sp. LG1
AQTVPWGIPHIKADKAHAAGVTGSGVKVAILDTGIDANHADLNVKGGASFVSGEPNALQDGNGHGTHVAGTDAALNNTTGVLGVAYNADLYAVKVLSASGSGTLSGIAQGIEWSISNGMNVINMSLGGSSGSTALQQACNNAYNRGIVVIAAAGNSGSSGNRNTMGYPARYSSVIAVGAVSSNNTRASFSSVGSELEVMAPGVNILSTTPGNNYASFNGTSMAAPHVAGAAALIKAKYPSMTNVQIRERLKNTATNLGDPFFYGKGVINVESALQ

SEQ ID NO: 69879 - protein, 275 aa, Bacillus sp. LG1
AQTVPWGIPHIKADKAHAAGVTGSGVKVAILDTGIDANHADLAVKGGASFVSGEPNALQDGNGHGTHVAGTVAALNNTTGVLGVAYNADLYAVKVLSASGSGTLSGIAQGIEWSISNGMNVINMSLGGSSGSTALQQACNNAYNRGIVVIAAAGNSGSSGNRNTMGYPARYSSVIAVGAVSSNNTRASFSSVGSELEVMAPGVNILSTTPGNNYASFNGTSMAAPHVAGAAALIKAKYPSMTNVQIRERLKNTATNLGDPFFYGKGVINVESALQ

SEQ ID NO: 69880 - protein, 275 aa, Bacillus sp. LG1
AQTVPWGIPHIKADNAHAAGVTGSGVKVAILDTGIDANHADLNVKGGASFVSGEPNALQDGNGHGTHVAGTVAALNNTTGVLGVAYNADLYAVKVLSASGSGTLSGIAQGIEWSISNGMNVINMSLGGSSGSTALQQACNNAYNRGIVVIAAAGNSGSSGNRNTMGYPARYSSVIAVGAVSSNNTRASFSSVGSELEVMAPGVNILSTTPGNNYASFNGTSMAAPHVAGAAALIKAKYPSMTNVQIRERLKNTATNLGDPFFYGKGVINVESALQ

SEQ ID NO: 69881 - protein, 275 aa, Bacillus sp. LG1
AQTVPWGIPHIKADKAHAAGVTGSGVKVAILDTGIDANHADLNVKGGASFVSGEPNALQDGNGHGTMVAGTVAALNNTTGVLGVAYNADLYAVKVLSASGSGTLSGIAQGIEWSISNGMNVINMSLGGSSGSTALQQACNNAYNRGIVVIAAAGNSGSSGNRNTMGYPARYSSVIAVGAVSSNNTRASFSSVGSELEVMAPGVNILSTTPGNNYASFNGTSMAAPHVAGAAALIKAKYPSMTNVQIRERLKNTATNLGDPFFYGKGVINVESALQ

SEQ ID NO: 69882 - protein, 275 aa, Bacillus sp. LG1
AQTVPWGIPHIKADKAHAAGVTGSGVKVAILDTGIDANHADLNVKGGASFVSGEPNALQDGNGHGTHVAGTVAALNNTTGVLGVAYNADLYAVKVLSASGSGTLSGIAQGIEWSISNGMNVINMSLGGSSGSTALQQACNNAYNRGIVVIAAAGNSGSSGNRNTMGYPARYSSVIAVGAVSSNNTRATFSSVGSELEVMAPGVNILSTTPGNNYASFNGTSMAAPHVAGAAALIKAKYPSMTNVQIRERLKNTATNLGDPFFYGKGVINVESALQ

SEQ ID NO: 69883 - protein, 275 aa, Bacillus sp. LG1
AQTVPWGIPHIKADKAHAAGVTGSGVKVAILDTGIDANHADLNVKGGASFVSGEPNALQDGNAHGTHVAGTVAALNNTTGVLGVAYNADLYAVKVLSASGSGTLSGIAQGIEWSISNGMNVINMSLGGSSGSTALQQACNNAYNRGIVVIAAAGNSGSSGNRNTMGYPARYSSVIAVGAVSSNNTRASFSSVGSELEVMAPGVNILSTTPGNNYASFNGTSMAAPHVAGAAALIKAKYPSMTNVQIRERLKNTATNLGDPFFYGKGVINVESALQ

SEQ ID NO: 69884 - protein, 275 aa, Bacillus sp. LG1
AQTVPWGIPHIKADKAHAAGVTGSGVKVAILDTGIDANHADLNVKGGASFVSGEPNALQDGNGHGTHVAGTVAALNNTTGVLGVAYNADLYAVKVLSASGSGTLSGIAQGIEWSISNGMNVINMSLGGSSGSTALQQACNNAYNRGIVVIAAAGNSGSSGNRNTMGYPARYSSVIAVGAVSSNNTRASFSSVGSELEVMAPGVNILSTTPGNNYASFNGTSMAAPHVAGAAALIKAKYPSMTNVPIRERLKNTATNLGDPFFYGKGVINVESALQ

SEQ ID NO: 69885 - protein, 275 aa, Bacillus sp. LG1
AQTVPWGIPHIKADYAHAAGVTGSGVKVAILDTGIDANHADLNVKGGASFVSGEPNALQDGNGHGTHVAGTVAALNNTTGVLGVAYNADLYAVKVLSASGSGTLSGIAQGIEWSISNGMNVINMSLGGSSGSTALQQACNNAYNRGIVVIAAAGNSGSSGNRNTMGYPARYSSVIAVGAVSSNNTRASFSSVGSELEVMAPGVNILSTTPGNNYASFNGTSMAAPHVAGAAALIKAKYPSMTNVQIRERLKNTATNLGDPFFYGKGVINVESALQ

SEQ ID NO: 69886 - protein, 275 aa, Bacillus sp. LG1
AQTVPWGIPHIKADKAHAAGVTGSGVKVAILDTGIDANHADLNVKGGASFVSGEPNALQDGNGHGTHVAGTVAALNPTTGVLGVAYNADLYAVKVLSASGSGTLSGIAQGIEWSISNGMNVINMSLGGSSGSTALQQACNNAYNRGIVVIAAAGNSGSSGNRNTMGYPARYSSVIAVGAVSSNNTRASFSSVGSELEVMAPGVNILSTTPGNNYASFNGTSMAAPHVAGAAALIKAKYPSMTNVQIRERLKNTATNLGDPFFYGKGVINVESALQ

SEQ ID NO: 69887 - protein, 275 aa, Bacillus sp. LG1
AQTVPWGIPHIKADKAHAAGVTGSGVKVAILDTGIDANHADLNVKGGASFPSGEPNALQDGNGHGTHVAGTVAALNNTTGVLGVAYNADLYAVKVLSASGSGTLSGIAQGIEWSISNGMNVINMSLGGSSGSTALQQACNNAYNRGIVVIAAAGNSGSSGNRNTMGYPARYSSVIAVGAVSSNNTRASFSSVGSELEVMAPGVNILSTTPGNNYASFNGTSMAAPHVAGAAALIKAKYPSMTNVQIRERLKNTATNLGDPFFYGKGVINVESALQ

SEQ ID NO: 69888 - protein, 275 aa, Bacillus sp. LG1
AQTVPWGIPHIKADKAHAAGVTGSGVKVAILDTGIDANHADLNVKGGASFVSGEPNALQDGNGHGTHVAGTVAALNNTTGVLGVAYNADLYAVKVLSASGSGTLSGIAQGIEWSISNGMNVINMSLGGSSGSTALQQACNNAYNRGIVVIAAAGNSGSSGNRNTMGYPARYSSVIAVGAVSSNNTRASFSSVGSELEVMAPGVNILSTTPGNNYASFNGTSMAAPHVAGAAALIKAAYPSMTNVQIRERLKNTATNLGDPFFYGKGVINVESALQ

SEQ ID NO: 69889 - protein, 275 aa, Bacillus sp. LG1
AQTVPWGIPHIKADKAHAAGVTGSGVKVAILDTGIDANHADLNVKGGASFVSGEPNALQDGNRHGTHVAGTVAALNNTTGVLGVAYNADLYAVKVLSASGSGTLSGIAQGIEWSISNGMNVINMSLGGSSGSTALQQACNNAYNRGIVVIAAAGNSGSSGNRNTMGYPARYSSVIAVGAVSSNNTRASFSSVGSELEVMAPGVNILSTTPGNNYASFNGTSMAAPHVAGAAALIKAKYPSMTNVQIRERLKNTATNLGDPFFYGKGVINVESALQ

SEQ ID NO: 69890 - protein, 275 aa, Bacillus sp. LG1
AQTVPWGIPHIKADKAHAAGVTGSGVKVAILDTGIDANHADLNVKGGASFVSGEPNALQDGNGHGTHVAGTVAALNNTTGVLGVAYNADLYAVKVLSASGSGTLSGIAQGIEWSISNGMNVINMSLGGSSGSTALQQACNNAVNRGIVVIAAAGNSGSSGNRNTMGYPARYSSVIAVGAVSSNNTRASFSSVGSELEVMAPGVNILSTTPGNNYASFNGTSMAAPHVAGAAALIKAKYPSMTNVQIRERLKNTATNLGDPFFYGKGVINVESALQ

SEQ ID NO: 69891 - protein, 275 aa, Bacillus sp. LG1
AQTVPWGIPHIKADKAHAAGVTGSGVKVAILDTGIDANHADLNVKGGASFVSGEPNALQDGNGHGTHVAGTVAALNNTTGVLGVAYNADLYAVKVLSASGSGTLSGIAQGIEWSISNGMNVINMSLGGSSGSTALQQACNNAYNRGIVVIAAAGNSGSSGNRNTMGYPARYSSVIAVGAVSSNNTRASFSSVGSELEVMAPGVNILSTTPGNNYASFNGTSMAAPHVAGAAALIKAKYPSMTNVNIRERLKNTATNLGDPFFYGKGVINVESALQ

SEQ ID NO: 69892 - protein, 275 aa, Bacillus sp.
AQTVPWGIPHIKADKAHAAGVTGSGVKVAILDTGIDANHADLNVKGGASFVSGEPNALQDGNGHGTHVAGTVAALDNTTGVLGVAYNADLYAVKVLSASGSGTLSGIAQGIEWSISNRMNVINMSLGGDAGSTALQQACNNAYNRGIVVIAAAGNSGSSGNRNTMDYPARYSSVIAVGAVSSNNTRASFSSVGSELEVMAPGVNILSTTPGNNYASFNGTSMAAPHVAGAAALIKAKYPSMTNVQIRNRLKNTATNLGDPFFYGKGVINVESALQ

SEQ ID NO: 69893 - protein, 275 aa, Bacillus amyloliquefaciens
AQSVPYGVSQIKAPALHSQGYTGSNVKVAVIDSGIDSSHPDLKVAGGASMVPSETNPFQDNNSHGTHVAGTVAALNNSIGVLGVAPSASLYAVKVLNGSGSGQYSWIINGIEWAIANNMDVINMSLGGPSGSAALKAAVDKAVASGVVVVAAAGNEGTSGSSSTVGYPGKYPSVIAVGAVDSSNQRASFSSVGPELDVMAPGVSIQSTLPGNKYGALNGTSMASPHVAGAAALILSKHPNWTNTQVRSSLENTTTKLGDSFYYGKGLINVQAAAQ

SEQ ID NO: 69894 - protein, 275 aa, Bacillus sp. LG1
AQTVPWGIPHIKADKAHAAGVTGSGVKVAILDTGIDANHADLNVKLGASFVSGEPNALQDGNGHGTHVAGTVAALNNTTGVLGVAYNADLYAVKVLSASGSGTLSGIAQGIEWSISNGMNVINMSLGGSSGSTALQQACNNAYNRGIVVIAAAGNSGSSGNRNTMGYPARYSSVIAVGAVSSNNTRASFSSVGSELEVMAPGVNILSTTPGNNYASFNGTSMAAPHVAGAAALIKAKYPSMTNVQIRERLKNTATNLGDPFFYGKGVINVESALQ

SEQ ID NO: 69895 - protein, 275 aa, Bacillus sp. LG1
AQTVPWGIPHIKADKAHAAGVTGSGVKVAILDTGIDANHADLNVKGGASFVSGEPNALQDGNGHGTHVAGTVAALNNTTGVLGVAYNADLYAVKVLSASGSGTLSGIAQGIEWSISNGMNVINMSLGGSSGSTALQQACNNAYNRGIVVIAAAGNSGSSGNRNTMGYPARYSSVIAVGAVSSNNTRASFSSVGSELEVMAPGVNILSTTTGNNYASFNGTSMAAPHVAGAAALIKAKYPSMTNVQIRERLKNTATNLGDPFFYGKGVINVESALQ

SEQ ID NO: 69896 - protein, 275 aa, Bacillus sp. LG1
AQTVPWGIPHIKADKAHAAGVTGSGVKVAILDTGIDANHADLNVKGGASFVSGEPNALQDGNGHGTHVAGTVAALNNTTGVLGVAYNADLYAVKVLSASGSGTLSGIAQGIEWSISNGMNVINMGLGGSSGSTALQQACNNAYNRGIVVIAAAGNSGSSGNRNTMGYPARYSSVIAVGAVSSNNTRASFSSVGSELEVMAPGVNILSTTPGNNYASFNGTSMAAPHVAGAAALIKAKYPSMTNVQIRERLKNTATNLGDPFFYGKGVINVESALQ

SEQ ID NO: 69897 - protein, 275 aa, Bacillus sp. LG1
AQTVPWGIPHIKADKAHAAGVTGSGVKVAILDTGIDANHADLNVKGGASFVSGEPNALQDGNGHGTHVAGTVAALNNTTGVLGVAYNADLYAVKVLSASGSGTLSGIAQGIEWSISNGMNVINMSLGGSSGSTALQQACNNAYNRGIVVIAAAGNSGSSGNRNTMGYPARYSSVIAVGAVSSNNTRASFSSVGSELEVMAPGVNILSTTPGNNYASFNGTSMAAPHFAGAAALIKAKYPSMTNVQIRERLKNTATNLGDPFFYGKGVINVESALQ

SEQ ID NO: 69898 - protein, 275 aa, Bacillus sp. LG1
AQTVPWGIPHIKADKAHAAGVTGSGVKVAILDTGIDANHADLNVKGGASFVSGEPNALQDGNGHGTHVAGTVAALNNTTGVLGVAYNADLYAVKVLSASGSGTLSGIAQGIEWSISNGMNVINMSLGGSSGSTALQQACNNAYNRGIVVIAAAGNSGSSGNRNTMGYPARYSSVIAVGAVSSNNTRASFSSVGSELEVMAPGVNILSTTPGNNYASFNGTSMAAPHVAGAAQLIKAKYPSMTNVQIRERLKNTATNLGDPFFYGKGVINVESALQ

SEQ ID NO: 69899 - protein, 275 aa, Bacillus sp. LG1
AQTVPWGIPHIKADKAHAAGVTGSGVKVAILDTGIDANHADLNVKGGASFVSGEPNALQDENGHGTHVAGTVAALNNTTGVLGVAYNADLYAVKVLSASGSGTLSGIAQGIEWSISNGMNVINMSLGGSSGSTALQQACNNAYNRGIVVIAAAGNSGSSGNRNTMGYPARYSSVIAVGAVSSNNTRASFSSVGSELEVMAPGVNILSTTPGNNYASFNGTSMAAPHVAGAAALIKAKYPSMTNVQIRERLKNTATNLGDPFFYGKGVINVESALQ

SEQ ID NO: 69900 - protein, 275 aa, Bacillus sp. LG1
AQTVPWGIPHIKADKAHAAGVTGSGVKVAILDTGIDANHADLNVKGGASFVSGEPNALQDGNGHGTLVAGTVAALNNTTGVLGVAYNADLYAVKVLSASGSGTLSGIAQGIEWSISNGMNVINMSLGGSSGSTALQQACNNAYNRGIVVIAAAGNSGSSGNRNTMGYPARYSSVIAVGAVSSNNTRASFSSVGSELEVMAPGVNILSTTPGNNYASFNGTSMAAPHVAGAAALIKAKYPSMTNVQIRERLKNTATNLGDPFFYGKGVINVESALQ

SEQ ID NO: 69901 - protein, 275 aa, Bacillus sp. LG1
AQTVPWGIPHIKADKAHAAGVTGSGVKVAILDTGIDANHADLNVKGGASFVSGEPNALQDGNGHGTHVAGTVAALNNTTGVLGVAYNADLYAVKVLSASGSGTLSGIAQGIEWSISNGMNVINMSLGGSSGSTALQQACNNAYNRGIVVIAAAGNSGSSGNRNTMGYPARYSSVIAVGAVSSNNTRASFSSVGSELEVMAPGVNILSTTPGNNYHSFNGTSMAAPHVAGAAALIKAKYPSMTNVQIRERLKNTATNLGDPFFYGKGVINVESALQ

SEQ ID NO: 69902 - protein, 275 aa, Bacillus sp. LG1
AQTVPWGIPHIKADKAHAAGVTGSGVKVAILDTGIDANHADLNVKGGASFVSGEPNALQDGNGHGTHVAGTVAALNNTTGVLGVAYNADLYAVKVLSASGSGTLSGIAQGIEWSISNGMNVINMSLGGSSGSTALQQACNNAYNRGIVVIAAAGNSGSSGNRNEMGYPARYSSVIAVGAVSSNNTRASFSSVGSELEVMAPGVNILSTTPGNNYASFNGTSMAAPHVAGAAALIKAKYPSMTNVQIRERLKNTATNLGDPFFYGKGVINVESALQ

SEQ ID NO: 69903 - protein, 275 aa, Bacillus sp. LG1
AQTVPWGIPHIKADKAHAAGVTGSGVKVAILDTGIDANHADLNVKGGASFVSGEPNALQDGNGHGTHVAGTVAALNNTTGVLGVAYNADLYAVKVLSASGSGTLSGIAQGIEWSISNGHNVINMSLGGSSGSTALQQACNNAYNRGIVVIAAAGNSGSSGNRNTMGYPARYSSVIAVGAVSSNNTRASFSSVGSELEVMAPGVNILSTTPGNNYASFNGTSMAAPHVAGAAALIKAKYPSMTNVQIRERLKNTATNLGDPFFYGKGVINVESALQ

SEQ ID NO: 69904 - protein, 275 aa, Bacillus sp. LG1
AQTVPWGIPHIKADKAHAAGVTGSGVKVAILDTGIDANHADLNVKGGASFVSGEPNALQDGNGHGTHVAGTVAALNNTTGVLGVAYNADLYAVKVLSASGSGTLSGIAQGIEWSISNGMNVINMSLGGSSGSTALQQACNNAYNRGIVVIAAAGNSGSSGNRNTMGYPARYSSVIAVGAVSSNNTRASFSSVGSELEVMAPGVNILSTTPGNNYASFNGTSMAAPHVAGAAALIKAKYPSMTNVQIRERLKNTATNLGDPFFYGDGVINVESALQ

SEQ ID NO: 69905 - protein, 275 aa, Bacillus sp. LG1
AQTVPWGIPHIKADKAHAAGVTGSGVKVAILDTGIDANHADLNVKGGASFVSGEPNALQDGNGHGTHVAGTVAALNNTTGVLGVAYNADLYAVKVLSASGSGTLSGIAQGIEWSISNGMNVINMSLGGSSGSTALQQACNNAYNRGIVVIAAAGNSGSTGNRNTMGYPARYSSVIAVGAVSSNNTRASFSSVGSELEVMAPGVNILSTTPGNNYASFNGTSMAAPHVAGAAALIKAKYPSMTNVQIRERLKNTATNLGDPFFYGKGVINVESALQ

SEQ ID NO: 69906 - protein, 275 aa, Bacillus sp. LG1
AQTVPWGIPHIKADKAHAAGVTGSGVKVAILDTGIDANHADLGVKGGASFVSGEPNALQDGNGHGTHVAGTVAALNNTTGVLGVAYNADLYAVKVLSASGSGTLSGIAQGIEWSISNGMNVINMSLGGSSGSTALQQACNNAYNRGIVVIAAAGNSGSSGNRNTMGYPARYSSVIAVGAVSSNNTRASFSSVGSELEVMAPGVNILSTTPGNNYASFNGTSMAAPHVAGAAALIKAKYPSMTNVQIRERLKNTATNLGDPFFYGKGVINVESALQ

SEQ ID NO: 69907 - protein, 275 aa, Bacillus sp. LG1
AQTVPWGIPHIKADKAHAAGVTGSGVKVAILDTGIDANHADLNVKGGESFVSGEPNALQDGNGHGTHVAGTVAALNNTTGVLGVAYNADLYAVKVLSASGSGTLSGIAQGIEWSISNGMNVINMSLGGSSGSTALQQACNNAYNRGIVVIAAAGNSGSSGNRNTMGYPARYSSVIAVGAVSSNNTRASFSSVGSELEVMAPGVNILSTTPGNNYASFNGTSMAAPHVAGAAALIKAKYPSMTNVQIRERLKNTATNLGDPFFYGKGVINVESALQ

SEQ ID NO: 69908 - protein, 275 aa, Bacillus sp. LG1
AQTVPWGIPHIKADKAHAAGVTGSGVKVAILDTGIDANHADLNVKGGASFVSGEPNALQDGNGHGTHVAGTVAASNNTTGVLGVAYNADLYAVKVLSASGSGTLSGIAQGIEWSISNGMNVINMSLGGSSGSTALQQACNNAYNRGIVVIAAAGNSGSSGNRNTMGYPARYSSVIAVGAVSSNNTRASFSSVGSELEVMAPGVNILSTTPGNNYASFNGTSMAAPHVAGAAALIKAKYPSMTNVQIRERLKNTATNLGDPFFYGKGVINVESALQ

SEQ ID NO: 69909 - protein, 275 aa, Bacillus sp. LG1
AQTVPWGIPHIKADKAHAAGVTGSGVKVAILDTGIDANHADLLVKGGASFVSGEPNALQDGNGHGTHVAGTVAALNNTTGVLGVAYNADLYAVKVLSASGSGTLSGIAQGIEWSISNGMNVINMSLGGSSGSTALQQACNNAYNRGIVVIAAAGNSGSSGNRNTMGYPARYSSVIAVGAVSSNNTRASFSSVGSELEVMAPGVNILSTTPGNNYASFNGTSMAAPHVAGAAALIKAKYPSMTNVQIRERLKNTATNLGDPFFYGKGVINVESALQ

SEQ ID NO: 69910 - protein, 275 aa, Bacillus sp. LG1
AQTVPWGIPHIKADKAHAAGVTGSGVKVAILDTGIDANHADLNVKGGASFVSGEPNALQVGNGHGTHVAGTVAALNNTTGVLGVAYNADLYAVKVLSASGSGTLSGIAQGIEWSISNGMNVINMSLGGSSGSTALQQACNNAYNRGIVVIAAAGNSGSSGNRNTMGYPARYSSVIAVGAVSSNNTRASFSSVGSELEVMAPGVNILSTTPGNNYASFNGTSMAAPHVAGAAALIKAKYPSMTNVQIRERLKNTATNLGDPFFYGKGVINVESALQ

SEQ ID NO: 69911 - protein, 275 aa, Bacillus sp. LG1
AQTVPWGIPHIKADKAHAAGVTGSGVKVAILDTGIDANHADLNVKGGASFVSGEPNALQDGNGHGTHVAGTVAALNNTTGVLGVAYNADLYAVKVLSASGSGTLSGIAQGIEWSISNGMNVINMSLGGSSGSTALQQACNNAYNRGIVNIAAAGNSGSSGNRNTMGYPARYSSVIAVGAVSSNNTRASFSSVGSELEVMAPGVNILSTTPGNNYASFNGTSMAAPHVAGAAALIKAKYPSMTNVQIRERLKNTATNLGDPFFYGKGVINVESALQ

SEQ ID NO: 69912 - protein, 275 aa, Bacillus sp. LG1
AQTVPWGIPHIKADKAHAAGVTGSGVKVAILDEGIDANHADLNVKGGASFVSGEPNALQDGNGHGTHVAGTVAALNNTTGVLGVAYNADLYAVKVLSASGSGTLSGIAQGIEWSISNGMNVINMSLGGSSGSTALQQACNNAYNRGIVVIAAAGNSGSSGNRNTMGYPARYSSVIAVGAVSSNNTRASFSSVGSELEVMAPGVNILSTTPGNNYASFNGTSMAAPHVAGAAALIKAKYPSMTNVQIRERLKNTATNLGDPFFYGKGVINVESALQ

SEQ ID NO: 69913 - protein, 275 aa, Bacillus sp. LG1
AQTVPWGIPHIKADKAHAAYVTGSGVKVAILDTGIDANHADLNVKGGASFVSGEPNALQDGNGHGTHVAGTVAALNNTTGVLGVAYNADLYAVKVLSASGSGTLSGIAQGIEWSISNGMNVINMSLGGSSGSTALQQACNNAYNRGIVVIAAAGNSGSSGNRNTMGYPARYSSVIAVGAVSSNNTRASFSSVGSELEVMAPGVNILSTTPGNNYASFNGTSMAAPHVAGAAALIKAKYPSMTNVQIRERLKNTATNLGDPFFYGKGVINVESALQ

SEQ ID NO: 69914 - protein, 275 aa, Bacillus sp. LG1
AQTVPWGIPHIKADKAHAAGVTGSGVKVAILDTGIDANHADLFVKGGASFVSGEPNALQDGNGHGTHVAGTVAALNNTTGVLGVAYNADLYAVKVLSASGSGTLSGIAQGIEWSISNGMNVINMSLGGSSGSTALQQACNNAYNRGIVVIAAAGNSGSSGNRNTMGYPARYSSVIAVGAVSSNNTRASFSSVGSELEVMAPGVNILSTTPGNNYASFNGTSMAAPHVAGAAALIKAKYPSMTNVQIRERLKNTATNLGDPFFYGKGVINVESALQ

SEQ ID NO: 69915 - protein, 275 aa, Bacillus sp. LG1
AQTVPWGIPHIKADKAHAAGVTGSGVKVAILDTGIDANHADLNVKGGASFVSGEPNALQDGNGHGTHVAGTVAALNNTTGVLGVAYNADLYAVKVLSASGSGTLSGIAQGIEWSISNGMNVIAMSLGGSSGSTALQQACNNAYNRGIVVIAAAGNSGSSGNRNTMGYPARYSSVIAVGAVSSNNTRASFSSVGSELEVMAPGVNILSTTPGNNYASFNGTSMAAPHVAGAAALIKAKYPSMTNVQIRERLKNTATNLGDPFFYGKGVINVESALQ

SEQ ID NO: 69916 - protein, 275 aa, Bacillus sp. LG1
AQTVPWGIPHIKADKAHAAGVTGSGVKVAILDTGIDANHADLNVKGGASFVSGEPNALQDGNGHGTHVAGTVAALNNTTGVLGVAYNADLYAVKVLSASGSGTLSGIAQGIEWSISNGMNVINMSLGGSSGSTALQQACNNAYNRGIVVIAAAKNSGSSGNRNTMGYPARYSSVIAVGAVSSNNTRASFSSVGSELEVMAPGVNILSTTPGNNYASFNGTSMAAPHVAGAAALIKAKYPSMTNVQIRERLKNTATNLGDPFFYGKGVINVESALQ

SEQ ID NO: 69917 - protein, 275 aa, Bacillus sp. LG1
AQTVPWGIPHIKADKAHAAGVTGSGVKMAILDTGIDANHADLNVKGGASFVSGEPNALQDGNGHGTHVAGTVAALNNTTGVLGVAYNADLYAVKVLSASGSGTLSGIAQGIEWSISNGMNVINMSLGGSSGSTALQQACNNAYNRGIVVIAAAGNSGSSGNRNTMGYPARYSSVIAVGAVSSNNTRASFSSVGSELEVMAPGVNILSTTPGNNYASFNGTSMAAPHVAGAAALIKAKYPSMTNVQIRERLKNTATNLGDPFFYGKGVINVESALQ

SEQ ID NO: 69918 - protein, 275 aa, Bacillus sp. LG1
AQTVPWGIPHIKADKAHAAGVTGSGVKVAILDTGIDANHADLNVKGGASFVSGEPNALQDGNGHGTHVAGTVAALNNTTGVLGVAYNADLYAVKVLSASGSGTLSGIAQGIEWSISNGMNVINMSLGGSSGSTALQQACNNAYNRGIVVIAAAGNSGSSGNRNTMGYPARYSSVIAVGAVSSNNTRASFSSVGSELEVMAPGVNILSTTPGNNYASFNGTSMAAPHVAGAAALIKAKYISMTNVQIRERLKNTATNLGDPFFYGKGVINVESALQ

SEQ ID NO: 69919 - protein, 275 aa, Bacillus sp. LG1
AQTVPWGIPHIKADKAHAAGVTGSGVKVAILDTGIDANHADLNVKGGASFVSGEPNALQDGNGHGTHVAGTVAALNNTTGVLGVAYNADLYAVKVLSASGSGTLSGIAQGIEWSISNGMNVINMSLGGSSGSTALQQACNNAYNRGIVVIAAAGNSGSSGNRNTMGYPARYSSVIAVGAVSSNNTRASFSSVGSELEVMAPGVNILSTTPGNNYASFNGTSMAAPLVAGAAALIKAKYPSMTNVQIRERLKNTATNLGDPFFYGKGVINVESALQ

SEQ ID NO: 69920 - protein, 275 aa, Bacillus sp. LG1
AQTVPWGIPHIKADKAHAAGVTGSGVKVAIQDTGIDANHADLNVKGGASFVSGEPNALQDGNGHGTHVAGTVAALNNTTGVLGVAYNADLYAVKVLSASGSGTLSGIAQGIEWSISNGMNVINMSLGGSSGSTALQQACNNAYNRGIVVIAAAGNSGSSGNRNTMGYPARYSSVIAVGAVSSNNTRASFSSVGSELEVMAPGVNILSTTPGNNYASFNGTSMAAPHVAGAAALIKAKYPSMTNVQIRERLKNTATNLGDPFFYGKGVINVESALQ

SEQ ID NO: 69921 - protein, 275 aa, Bacillus sp. LG1
AQTVPWGIPHIKADKAHAAGVTGSGVKVAILDTGIDANHADLNVKGGASFVSGEPNALQDGNGHGTHVAGTVAALNNTTGVLGVAYNADLYAVKVLSASGSGTLSGIAQGIEWSISNGMNVINMSLGGSSGSTALQQACNNAYNRGIVVIAAAGNSGSSGDRNTMGYPARYSSVIAVGAVSSNNTRASFSSVGSELEVMAPGVNILSTTPGNNYASFNGTSMAAPHVAGAAALIKAKYPSMTNVQIRERLKNTATNLGDPFFYGKGVINVESALQ

SEQ ID NO: 69922 - protein, 275 aa, Bacillus sp. LG1
AQTVVWGIPHIKADKAHAAGVTGSGVKVAILDTGIDANHADLNVKGGASFVSGEPNALQDGNGHGTHVAGTVAALNNTTGVLGVAYNADLYAVKVLSASGSGTLSGIAQGIEWSISNGMNVINMSLGGSSGSTALQQACNNAYNRGIVVIAAAGNSGSSGNRNTMGYPARYSSVIAVGAVSSNNTRASFSSVGSELEVMAPGVNILSTTPGNNYASFNGTSMAAPHVAGAAALIKAKYPSMTNVQIRERLKNTATNLGDPFFYGKGVINVESALQ

SEQ ID NO: 69923 - protein, 275 aa, Bacillus sp. LG1
AQTVPWGIPHIKADTAHAAGVTGSGVKVAILDTGIDANHADLNVKGGASFVSGEPNALQDGNGHGTHVAGTVAALNNTTGVLGVAYNADLYAVKVLSASGSGTLSGIAQGIEWSISNGMNVINMSLGGSSGSTALQQACNNAYNRGIVVIAAAGNSGSSGNRNTMGYPARYSSVIAVGAVSSNNTRASFSSVGSELEVMAPGVNILSTTPGNNYASFNGTSMAAPHVAGAAALIKAKYPSMTNVQIRERLKNTATNLGDPFFYGKGVINVESALQ

SEQ ID NO: 69924 - protein, 275 aa, Synthetic construct
AQVVPWGIPHIKADKAHASGVTGSGVKVAVLDTGIDANHADLNVKGGASFVSGEPNALQDGNGHGTHVAGTVAALDNTTGVLGVAYNAFLYAVKVLGASGSGTLSGIAQGIEWSIANDMDVINMSLGSSTGSTALQQACNNAYASGIVVVAAAGNSGSNGKRNTMGYPARYSSVIAVGAVDSSNNRASFSSVGSELEVMAPGVSILSTTPGNNYESFNGTSMASPHVAGAAALIKAKYPSMTNVQIRNKLKNTATNLGDAFYYGHGVINVEKALQ

SEQ ID NO: 69925 - protein, 275 aa, Bacillus sp. LG1
AQTVPWGIPHIKADVAHAAGVTGSGVKVAILDTGIDANHADLNVKGGASFVSGEPNALQDGNGHGTHVAGTVAALNNTTGVLGVAYNADLYAVKVLSASGSGTLSGIAQGIEWSISNGMNVINMSLGGSSGSTALQQACNNAYNRGIVVIAAAGNSGSSGNRNTMGYPARYSSVIAVGAVSSNNTRASFSSVGSELEVMAPGVNILSTTPGNNYASFNGTSMAAPHVAGAAALIKAKYPSMTNVQIRERLKNTATNLGDPFFYGKGVINVESALQ

SEQ ID NO: 69926 - protein, 275 aa, Bacillus sp. LG1
AQTVPWGIPHIKADKAHAAGVTGSGVKVAILDTGIDANHADLNVKGGASFVSGEPNALQDGNGHGTHVAGTVAALNNTTGVLGVAYNADLYAVKVLSASGSGTLSGIAQGIEWSISNGMNVINMSLGGSSGSTALQQACNNAYNTGIVVIAAAGNSGSSGNRNTMGYPARYSSVIAVGAVSSNNTRASFSSVGSELEVMAPGVNILSTTPGNNYASFNGTSMAAPHVAGAAALIKAKYPSMTNVQIRERLKNTATNLGDPFFYGKGVINVESALQ

SEQ ID NO: 69927 - protein, 275 aa, Bacillus sp. LG1
AQTVPWGIPHIKADKAHAAGVTGSGVKVAILDTGIDANHADLNVKGGASFVSGEPNALQDGNGHGTHVAGTVAALNNTTGVLGVAYNADLYAVKVLSASGSGTLSGIAQGIEWSISNGMNVINMSLGGSSGSTALQQACNNAYNRGIVVIAAAGNSGSSGERNTMGYPARYSSVIAVGAVSSNNTRASFSSVGSELEVMAPGVNILSTTPGNNYASFNGTSMAAPHVAGAAALIKAKYPSMTNVQIRERLKNTATNLGDPFFYGKGVINVESALQ

SEQ ID NO: 69928 - protein, 275 aa, Bacillus sp. LG1
AQTVPWGIPHIKADKAHAAGVTGSGVKVAILDTGIDANHADLNVKGGASFVSGEPNALQDGNGHGTHVAGTVAALNNTTGVLGVAYNADLYAVKVLSASGSGTLSGIAQGIEWSISNGMNVINMSLGGSSGSTALQQACNNAYNRGIVVIAAAGNSGSSGNRNTMGYPARYSSVIAVGAVSSNNTRASFSSVGSELEVMAPGVNILSTTPGNNYASFNGTSMAAPHVAGMAALIKAKYPSMTNVQIRERLKNTATNLGDPFFYGKGVINVESALQ

SEQ ID NO: 69929 - protein, 275 aa, Bacillus sp. LG1
AQTVPWGIPHIKADKAHAAGVTGSGVKVAILDTGIDANHADLNVKGGAHFVSGEPNALQDGNGHGTHVAGTVAALNNTTGVLGVAYNADLYAVKVLSASGSGTLSGIAQGIEWSISNGMNVINMSLGGSSGSTALQQACNNAYNRGIVVIAAAGNSGSSGNRNTMGYPARYSSVIAVGAVSSNNTRASFSSVGSELEVMAPGVNILSTTPGNNYASFNGTSMAAPHVAGAAALIKAKYPSMTNVQIRERLKNTATNLGDPFFYGKGVINVESALQ

SEQ ID NO: 69930 - protein, 275 aa, Bacillus sp.
AQTVPWGIPHIKADKAHAAGVTGSGVKVAILDTGIDANHADLNVKGGASFVSDEPNALQDGNGHGTHVAGTVAALDNTTGVLGVAYNADLYAVKVLSASGSGTLSGIAQGIEWSISNRMNVINMSLGGSSGSTALQQACNNAYNRGIVVIAAAGNSGSSGNRNTMGYPARYSSVIAVGAVSSNNTRASFSSVGSELEVMAPGVNILSTTPGNNYASFNGTSMAAPHVAGAAALIKAKYPSMTNVQIRERLKNTATRLGDPFFYGKGVINVEKALQ

SEQ ID NO: 69931 - protein, 275 aa, Bacillus sp. LG1
AQTVTWGIPHIKADKAHAAGVTGSGVKVAILDTGIDANHADLNVKGGASFVSGEPNALQDGNGHGTHVAGTVAALNNTTGVLGVAYNADLYAVKVLSASGSGTLSGIAQGIEWSISNGMNVINMSLGGSSGSTALQQACNNAYNRGIVVIAAAGNSGSSGNRNTMGYPARYSSVIAVGAVSSNNTRASFSSVGSELEVMAPGVNILSTTPGNNYASFNGTSMAAPHVAGAAALIKAKYPSMTNVQIRERLKNTATNLGDPFFYGKGVINVESALQ

SEQ ID NO: 69932 - protein, 275 aa, Bacillus sp. LG1
AQTVPWGIPHIKADKAHAAGVTGSGVKVAILDTGIDANHADLNVKGGASFVSGEPNALQDGNGHGTHVAGTVAALNNTTGVLGVAYNADLYAVKVLSASGSGTLSGIAQGIEWSISNGMNVINMSLGGSSGSTALQQACNNAYNRGIVVIAAAGNSGSSGKRNTMGYPARYSSVIAVGAVSSNNTRASFSSVGSELEVMAPGVNILSTTPGNNYASFNGTSMAAPHVAGAAALIKAKYPSMTNVQIRERLKNTATNLGDPFFYGKGVINVESALQ

SEQ ID NO: 69933 - protein, 275 aa, Bacillus sp. LG1
AQTVPWGIPHIKADKAHAAGVTGSGVKVAILDTGIDANHADLNVKGGASFVSGEPNALQDGNGHGTHVAGTVAALNNTTGVLGVAYNADLYAVKVLSASGSGTLSGIAQGIEWSISNGMNVINMSLGGSSGSTALQQACNNAYNRGIVVIAAAGNSGSSGNRNTMGYPARYSSVIAVGAVSSINTRASFSSVGSELEVMAPGVNILSTTPGNNYASFNGTSMAAPHVAGAAALIKAKYPSMTNVQIRERLKNTATNLGDPFFYGKGVINVESALQ

SEQ ID NO: 69934 - protein, 275 aa, Bacillus sp. LG1
AQTVPWGIPHIKADKAHAAGVTGSGVKVAILDTGIDANHADLNVKGGASFVSGEPNALQDGNGHGTHVAGTVAALNNTTGVLGVAYNADLYAVKVLSASGSGTLSGIAQGIEWSISNGMNVINMSLGGSSGSTALQQACNNAYNRGIVVIAAAGNSGSSGNRNTMGYPARYSSVIAVGAVSSNNTRASFSSVGSELEVMAPGVNILSTTPGNNYASFNGTSMAAGHVAGAAALIKAKYPSMTNVQIRERLKNTATNLGDPFFYGKGVINVESALQ

SEQ ID NO: 69935 - protein, 275 aa, Bacillus sp. LG1
AQTVPWGIPHIKADKAHAAGVTGSGVKVAILDTGIDANHADLNVKGGASFVSGEPNALQDGNGHGTSVAGTVAALNNTTGVLGVAYNADLYAVKVLSASGSGTLSGIAQGIEWSISNGMNVINMSLGGSSGSTALQQACNNAYNRGIVVIAAAGNSGSSGNRNTMGYPARYSSVIAVGAVSSNNTRASFSSVGSELEVMAPGVNILSTTPGNNYASFNGTSMAAPHVAGAAALIKAKYPSMTNVQIRERLKNTATNLGDPFFYGKGVINVESALQ

SEQ ID NO: 69936 - protein, 275 aa, Bacillus sp. LG1
AQTVPWGIPHIKADQAHAAGVTGSGVKVAILDTGIDANHADLNVKGGASFVSGEPNALQDGNGHGTHVAGTVAALNNTTGVLGVAYNADLYAVKVLSASGSGTLSGIAQGIEWSISNGMNVINMSLGGSSGSTALQQACNNAYNRGIVVIAAAGNSGSSGNRNTMGYPARYSSVIAVGAVSSNNTRASFSSVGSELEVMAPGVNILSTTPGNNYASFNGTSMAAPHVAGAAALIKAKYPSMTNVQIRERLKNTATNLGDPFFYGKGVINVESALQ

SEQ ID NO: 69937 - protein, 275 aa, Bacillus sp. LG1
AQTVPWGIPHIKADKAHAAGVTGSGVKVAILDTGIDANHADLNVKGGASFVSGEPNALQDGNGHGTHVAGTVAALNNTTGVLGVAYNADLYAVKVLSASGSGTLSGIAQGIEWSISNGMNVINMSLGGSSGSTALQQACNNAYNRGIVVIAAAGNSGSSGNRNTMGYPARYSSVIAVGAVSSNNTRASFSSVGSELEFMAPGVNILSTTPGNNYASFNGTSMAAPHVAGAAALIKAKYPSMTNVQIRERLKNTATNLGDPFFYGKGVINVESALQ

SEQ ID NO: 69938 - protein, 275 aa, Bacillus sp. LG1
AQTVPWGIPHIKADKAHAAGVTGSGVKVAILDTGIDANHADLNVKGGASFVSGEPNALQDGNGHGTHVAGTVAALNNTTGVLGVAYNADLYAVKVLSASGSGTLSGIAQGIEWSISNGMNVINMSLGGSSGSTALQQACNNAYNRGIVVIAAAGNSGSSGNRNTMGYPARYSSVIAVGAVSSNNTRASFSSVGSELEVMAPGVNILSTTPGNNYASFNGTSMAAPHVAGAAALIKAKYPSMTNVQIRERLKNTATNLGDPFFYGKGVINTESALQ

SEQ ID NO: 69939 - protein, 275 aa, Bacillus sp. LG1
AQTVPWGIPHIHADKAHAAGVTGSGVKVAILDTGIDANHADLNVKGGASFVSGEPNALQDGNGHGTHVAGTVAALNNTTGVLGVAYNADLYAVKVLSASGSGTLSGIAQGIEWSISNGMNVINMSLGGSSGSTALQQACNNAYNRGIVVIAAAGNSGSSGNRNTMGYPARYSSVIAVGAVSSNNTRASFSSVGSELEVMAPGVNILSTTPGNNYASFNGTSMAAPHVAGAAALIKAKYPSMTNVQIRERLKNTATNLGDPFFYGKGVINVESALQ

SEQ ID NO: 69940 - protein, 275 aa, Bacillus sp. LG1
AQTVPWGIPHIKADKAHAAGVTGSGVKVAILDTGIDANHADLNVKGGASFVSGEPNALQDGNGHGTHVAGTVAALNNTTGVLGVAYNADLYAVKVLSASGSGTLSGIAQGIEWSISNGMNVINMSLGGSSGSTALQQACNNAYNRGIVVIAAAGNSGSSGNRNTMGYPARYSSVIAVGAVSSNNTRASFSSVGSELEVMAPGVNILSTTPGNNYASFNGTSMAAPHVAGAANLIKAKYPSMTNVQIRERLKNTATNLGDPFFYGKGVINVESALQ

SEQ ID NO: 69941 - protein, 275 aa, Bacillus sp. LG1
AQTVPWGIPHIKADKAHAAGVTGSGVKVAILDTGIDANHADLNVKGGASFISGEPNALQDGNGHGTHVAGTVAALNNTTGVLGVAYNADLYAVKVLSASGSGTLSGIAQGIEWSISNGMNVINMSLGGSSGSTALQQACNNAYNRGIVVIAAAGNSGSSGNRNTMGYPARYSSVIAVGAVSSNNTRASFSSVGSELEVMAPGVNILSTTPGNNYASFNGTSMAAPHVAGAAALIKAKYPSMTNVQIRERLKNTATNLGDPFFYGKGVINVESALQ

SEQ ID NO: 69942 - protein, 275 aa, Bacillus sp. LG1
AQTVPWGIPHIKADKAHAAGVTGSGVKVAILDTGIDANHADLNVKGGASFVSGEPNALQDGNVHGTHVAGTVAALNNTTGVLGVAYNADLYAVKVLSASGSGTLSGIAQGIEWSISNGMNVINMSLGGSSGSTALQQACNNAYNRGIVVIAAAGNSGSSGNRNTMGYPARYSSVIAVGAVSSNNTRASFSSVGSELEVMAPGVNILSTTPGNNYASFNGTSMAAPHVAGAAALIKAKYPSMTNVQIRERLKNTATNLGDPFFYGKGVINVESALQ

SEQ ID NO: 69943 - protein, 275 aa, Bacillus sp. LG1
AQTVPWGIPHIKADKAHAAGVTGSGVKVAILDTGIDANHADLNVKGGASFHSGEPNALQDGNGHGTHVAGTVAALNNTTGVLGVAYNADLYAVKVLSASGSGTLSGIAQGIEWSISNGMNVINMSLGGSSGSTALQQACNNAYNRGIVVIAAAGNSGSSGNRNTMGYPARYSSVIAVGAVSSNNTRASFSSVGSELEVMAPGVNILSTTPGNNYASFNGTSMAAPHVAGAAALIKAKYPSMTNVQIRERLKNTATNLGDPFFYGKGVINVESALQ

SEQ ID NO: 69944 - protein, 275 aa, Bacillus sp. LG1
AQTVPWGIPHIKADKAHAAGVTGSGVKVAILDTGIDANHADNNVKGGASFVSGEPNALQDGNGHGTHVAGTVAALNNTTGVLGVAYNADLYAVKVLSASGSGTLSGIAQGIEWSISNGMNVINMSLGGSSGSTALQQACNNAYNRGIVVIAAAGNSGSSGNRNTMGYPARYSSVIAVGAVSSNNTRASFSSVGSELEVMAPGVNILSTTPGNNYASFNGTSMAAPHVAGAAALIKAKYPSMTNVQIRERLKNTATNLGDPFFYGKGVINVESALQ

SEQ ID NO: 69945 - protein, 275 aa, Bacillus sp. LG1
AQTVPWGIPHIKADKAHAAGVTGSGVKVAILDTGIDANHADLNVKGGASFVSGEPNALQDGNGHGTHVAGTVAALNNTTGVLGVAYNADLYAVKVLSASGSGTLSGIAQGIEWSISNGMNVINMSLGGSSGSTALQQACNNAYNRGIVVIAAAGNSGSSGNRNTMGYPARYSSVIAIGAVSSNNTRASFSSVGSELEVMAPGVNILSTTPGNNYASFNGTSMAAPHVAGAAALIKAKYPSMTNVQIRERLKNTATNLGDPFFYGKGVINVESALQ

SEQ ID NO: 69946 - protein, 275 aa, Bacillus sp. LG1
AQTVPWGIPHIKADKAHAAGVTGSGVKVAILDTGIDANHADLNVKGGASFVSGEPNALQDGNGHGTHVAGTVAALNNTTGVLGVAYNADLYAVKVLSASGSGTLSGIAQGIEWSISNGMNVINMSLGGSSGSTALQQACNNAYNRGIVVIAAAGNSGSSGNRNTMGYPARYSSVIAVGAVSSNNTRASFSSVGSELEVMAPGVNILSTTPGNNYASFNGTSMAAPHTAGAAALIKAKYPSMTNVQIRERLKNTATNLGDPFFYGKGVINVESALQ

SEQ ID NO: 69947 - protein, 275 aa, Bacillus sp. LG1
AQTVPWGIPHIKADKAHAAGVTGSGVKVAILDTGIDANHADLNVKGGASFVSGEPNALQDGNGHGTHVAGTVAALNNTTGVLGVAYNADLYAVKVLSASGSGTLSGIAQGIEWSISNGMNVINMSLGGSSGSTALQQACNNAYNRGIVVIAPAGNSGSSGNRNTMGYPARYSSVIAVGAVSSNNTRASFSSVGSELEVMAPGVNILSTTPGNNYASFNGTSMAAPHVAGAAALIKAKYPSMTNVQIRERLKNTATNLGDPFFYGKGVINVESALQ

SEQ ID NO: 69948 - protein, 275 aa, Bacillus sp. LG1
AQTVPWGIPHIKADKAHAAGVTGSGVKVAILDTGIDANHADLNVKGGASFVSGEPNALQDGNGHGTHVAGTVAALNNTTGVLGVAYNADLYAVKVLSASGSGTLSGIAQGIEWSISNGMNVINMSLGGSSGSTALQQACNNAYNRGIVVIAAAGNSGDSGNRNTMGYPARYSSVIAVGAVSSNNTRASFSSVGSELEVMAPGVNILSTTPGNNYASFNGTSMAAPHVAGAAALIKAKYPSMTNVQIRERLKNTATNLGDPFFYGKGVINVESALQ

SEQ ID NO: 69949 - protein, 275 aa, Bacillus sp. LG1
AQTVPWGIPHIKADKAHAAGVTGSGVKVAILDTGIDANHADLNVKGGASFVSGEPNALQDGNGHGTHVAGTKAALNNTTGVLGVAYNADLYAVKVLSASGSGTLSGIAQGIEWSISNGMNVINMSLGGSSGSTALQQACNNAYNRGIVVIAAAGNSGSSGNRNTMGYPARYSSVIAVGAVSSNNTRASFSSVGSELEVMAPGVNILSTTPGNNYASFNGTSMAAPHVAGAAALIKAKYPSMTNVQIRERLKNTATNLGDPFFYGKGVINVESALQ

SEQ ID NO: 69950 - protein, 275 aa, Bacillus sp. LG1
AQTVPWGIPHIKADKAHAAGVTGSGVKVAILDTGIDANHADLNVKGGASFVSGEPNALQDGNGHGTHVAGTVAALNNTTGVLGVAYNADLYAVKVLSASGSGTLSGIAQGIEWSISNGMNVINMSLGGSSGSTALQQACNNAYNRGIVVIAAAGNSGSSGNRNTMGYPARYSSVIAVGAVSSNNTRASFSSVGSELEVMAPGVNILSTTPGNNYASFNGTSMAAPHVAGIAALIKAKYPSMTNVQIRERLKNTATNLGDPFFYGKGVINVESALQ

SEQ ID NO: 69951 - protein, 275 aa, Bacillus sp. LG1
AQTVPWGAPHIKADKAHAAGVTGSGVKVAILDTGIDANHADLNVKGGASFVSGEPNALQDGNGHGTHVAGTVAALNNTTGVLGVAYNADLYAVKVLSASGSGTLSGIAQGIEWSISNGMNVINMSLGGSSGSTALQQACNNAYNRGIVVIAAAGNSGSSGNRNTMGYPARYSSVIAVGAVSSNNTRASFSSVGSELEVMAPGVNILSTTPGNNYASFNGTSMAAPHVAGAAALIKAKYPSMTNVQIRERLKNTATNLGDPFFYGKGVINVESALQ

SEQ ID NO: 69952 - protein, 275 aa, Bacillus sp. LG1
AQTVPWGIPHIKADKAHAAGVTGSGVKVAILDVGIDANHADLNVKGGASFVSGEPNALQDGNGHGTHVAGTVAALNNTTGVLGVAYNADLYAVKVLSASGSGTLSGIAQGIEWSISNGMNVINMSLGGSSGSTALQQACNNAYNRGIVVIAAAGNSGSSGNRNTMGYPARYSSVIAVGAVSSNNTRASFSSVGSELEVMAPGVNILSTTPGNNYASFNGTSMAAPHVAGAAALIKAKYPSMTNVQIRERLKNTATNLGDPFFYGKGVINVESALQ

SEQ ID NO: 69953 - protein, 275 aa, Bacillus sp. LG1
AQTVPWGIPHIKADKAHAAGVTGSGVKVAILDTGIDANHADLNVKGGASFVSGEPNALQDGNGHGTHVAGTVAALNNTTGVLGVAYNADLYAVKVLSASGSGTLSGIAQGIEWSISNGMNVINMSLGGSSGSTALQQACNNAYNRGIVVIAAAGNSGSSGNRNTMGYPARYSSVIAVGAVSSNNTRASFSSVGSELEVMAPGVNILSTTPGNNYASFNGTSMAAPHVAGAAALIKAKYPSMTNVQIRERLKNTASNLGDPFFYGKGVINVESALQ

SEQ ID NO: 69954 - protein, 275 aa, Bacillus sp. LG1
AQTVPWGIPHIKADKAHAAGVTGSGVKVAILDTGIDANHADLNVKGGASFVSGEPNALQDGNGHGTHVAGTVAALNNTTGVLGVAYNADLYAVKVLSASGSGTLSGIAQGVEWSISNGMNVINMSLGGSSGSTALQQACNNAYNRGIVVIAAAGNSGSSGNRNTMGYPARYSSVIAVGAVSSNNTRASFSSVGSELEVMAPGVNILSTTPGNNYASFNGTSMAAPHVAGAAALIKAKYPSMTNVQIRERLKNTATNLGDPFFYGKGVINVESALQ

SEQ ID NO: 69955 - protein, 275 aa, Bacillus sp. LG1
AQTVPWGIPHIKADKAHAAGVTGSGVKVAILDTGIDANHADQNVKGGASFVSGEPNALQDGNGHGTHVAGTVAALNNTTGVLGVAYNADLYAVKVLSASGSGTLSGIAQGIEWSISNGMNVINMSLGGSSGSTALQQACNNAYNRGIVVIAAAGNSGSSGNRNTMGYPARYSSVIAVGAVSSNNTRASFSSVGSELEVMAPGVNILSTTPGNNYASFNGTSMAAPHVAGAAALIKAKYPSMTNVQIRERLKNTATNLGDPFFYGKGVINVESALQ

SEQ ID NO: 69956 - protein, 275 aa, Bacillus sp. LG1
AQTVPWGIPHIKADKAHAAGVTGSGVKVAILDTGIDANHADLNVKGGASFVSGEPNALQDGNGHGTHVAGTVAALNNTTGVLGVAYNADLYAVKVLSASGSGTLSGIAQGIEWSISNGMNVINMSLGGSSGSTALQQACNNAYNRGIVVIAAAGNSGSSGNRNTMGYPARYSSVIAVGAVSFNNTRASFSSVGSELEVMAPGVNILSTTPGNNYASFNGTSMAAPHVAGAAALIKAKYPSMTNVQIRERLKNTATNLGDPFFYGKGVINVESALQ

SEQ ID NO: 69957 - protein, 275 aa, Bacillus sp. LG1
AQTVPWGIPHIKADKAHAAGVTGSGVKVAILDTGIDANHADLNVKGGASFVSGEPNALQDGNGHGTHVAGTVAALNNTTGVLGVAYNADLYAVTVLSASGSGTLSGIAQGIEWSISNGMNVINMSLGGSSGSTALQQACNNAYNRGIVVIAAAGNSGSSGNRNTMGYPARYSSVIAVGAVSSNNTRASFSSVGSELEVMAPGVNILSTTPGNNYASFNGTSMAAPHVAGAAALIKAKYPSMTNVQIRERLKNTATNLGDPFFYGKGVINVESALQ

SEQ ID NO: 69958 - protein, 275 aa, Bacillus sp. LG1
AQTVPWGIPHIKADKAHAAGVTGSGVKVAILDTGIDANHADLNVKGGASFVSGEPNALQDGNGHGTHVAGTVAALNNTTGVLGVAYNADLYAVKVLSASGSGTLSGIAQGIEWSISNGMNVINMSLGGSSGSTALQQACNNAYNRGIVVIAAAGNSGSSGNRNTMGYPARYSSVIAVGAVSSNNTRASFSSVGSELEVMAPGVNILSTTPGNNYASFNGTSMAAPHVAGAAALIKAGYPSMTNVQIRERLKNTATNLGDPFFYGKGVINVESALQ

SEQ ID NO: 69959 - protein, 275 aa, Bacillus sp.
AQTVPWGIPHIKADKAHAAGVTGSGVKVAILDTGIDANHADLNVKGGASFVTGEPNALQDGNGHGTHVAGTVAALDNTTGVLGVAYNADLYAVKVLSASGSGTLSGIAQGIEWSISNGMNVINMSLGVMHGSTALQQACNNAYNRGIVVIAAAGNSGSSGNRNTMDYPARYSSVIAVGAVSSNNTRASFSSVGSELEVMAPGVNILSTTPGNNYASRNGTSMAAPHVAGAAALIKAKYPSMTNVQIRNRLKNTATELGDPFFYGKGVINVEKALQ

SEQ ID NO: 69960 - protein, 275 aa, Bacillus sp. LG1
AQTVPWGIPHIKADKAHAAGVTGSGVKVAILDTGIDANHADLNVKGGASFVSGEPNALQDGNGHGTHVAGTVAALNNTTGVLGVAYNADLYAVKVLSASGSGTLSGIAQGIEWSISNGMNVINMSLGGSSGSTALQQACNNAYNRGIVVIAAAGNSGSSGNRNTMYYPARYSSVIAVGAVSSNNTRASFSSVGSELEVMAPGVNILSTTPGNNYASFNGTSMAAPHVAGAAALIKAKYPSMTNVQIRERLKNTATNLGDPFFYGKGVINVESALQ

SEQ ID NO: 69961 - protein, 275 aa, Bacillus sp. LG1
AQTVPWGIPHIKADKAHAAGVTGSGVKVAILDTGIDANHADLNVKGGASFVSGEPNALQDGNGHGTHVAGTVAALNNTTGVLGVAYNADLYAVKVLSASGSGTLSGIAQGIEWSISNGMNVINMSLGGSSGSTALQQACNNAYNRGIVVIAAAGNSGSSGNRNTMGYPARYSSVIAVGAVSSMNTRASFSSVGSELEVMAPGVNILSTTPGNNYASFNGTSMAAPHVAGAAALIKAKYPSMTNVQIRERLKNTATNLGDPFFYGKGVINVESALQ

SEQ ID NO: 69962 - protein, 275 aa, Bacillus sp. LG1
AQTVPWGIPHIKADKAHAAGVTGSGVKVAILDTGIDLNHADLNVKGGASFVSGEPNALQDGNGHGTHVAGTVAALNNTTGVLGVAYNADLYAVKVLSASGSGTLSGIAQGIEWSISNGMNVINMSLGGSSGSTALQQACNNAYNRGIVVIAAAGNSGSSGNRNTMGYPARYSSVIAVGAVSSNNTRASFSSVGSELEVMAPGVNILSTTPGNNYASFNGTSMAAPHVAGAAALIKAKYPSMTNVQIRERLKNTATNLGDPFFYGKGVINVESALQ

SEQ ID NO: 69963 - protein, 275 aa, Bacillus sp. LG1
AQTVPWGIPHIKADKAHAAGVTGSGVKVAILDTGIDANHADLNVKGGASFVSGEPNALQDGNGHGTHVAGTVAALNNTTGVLGVAYNADLYAVKVLSASGSGTLSGIAQGIEWSISNGMNVINMSLGGSSGSTALQQACNNAYNRGIVVIAAAGNSGSSGNRNTMGYPARYSSVIAVGAVSSNNTRASFSSVGSELETMAPGVNILSTTPGNNYASFNGTSMAAPHVAGAAALIKAKYPSMTNVQIRERLKNTATNLGDPFFYGKGVINVESALQ

SEQ ID NO: 69964 - protein, 275 aa, Bacillus sp. LG1
AQTVPWGIPHIGADKAHAAGVTGSGVKVAILDTGIDANHADLNVKGGASFVSGEPNALQDGNGHGTHVAGTVAALNNTTGVLGVAYNADLYAVKVLSASGSGTLSGIAQGIEWSISNGMNVINMSLGGSSGSTALQQACNNAYNRGIVVIAAAGNSGSSGNRNTMGYPARYSSVIAVGAVSSNNTRASFSSVGSELEVMAPGVNILSTTPGNNYASFNGTSMAAPHVAGAAALIKAKYPSMTNVQIRERLKNTATNLGDPFFYGKGVINVESALQ

SEQ ID NO: 69965 - protein, 275 aa, Bacillus sp. LG1
AQTVPWGIPHIKADKAHAAGVTGSGVKVAILDTGIDANHADLNVKGGASFVSGEPNALQDGNGHGTHVAGTVAALNNTTGVLGVAYNADLYAVKVLSASGSGTLSGIAQGIEWSISNGMNVINMSLGGSSGSTALQQACNNAYNRGIVVIAAAGNSGSSGNRNTMGYPARYSSVIAVGAVSSNNTRASFSSVGSELEVMAPGVNILSTTWGNNYASFNGTSMAAPHVAGAAALIKAKYPSMTNVQIRERLKNTATNLGDPFFYGKGVINVESALQ

SEQ ID NO: 69966 - protein, 275 aa, Bacillus sp. LG1
AQTVPWGIPHIKADKAHAAGVTGSGVKVAILDTGIDANHADLNVKGGASFVSGEPNALQDINGHGTHVAGTVAALNNTTGVLGVAYNADLYAVKVLSASGSGTLSGIAQGIEWSISNGMNVINMSLGGSSGSTALQQACNNAYNRGIVVIAAAGNSGSSGNRNTMGYPARYSSVIAVGAVSSNNTRASFSSVGSELEVMAPGVNILSTTPGNNYASFNGTSMAAPHVAGAAALIKAKYPSMTNVQIRERLKNTATNLGDPFFYGKGVINVESALQ

SEQ ID NO: 69967 - protein, 275 aa, Bacillus sp. LG1
AQTVPWGIPHIKADKAHAAGVTGSGVRVAILDTGIDANHADLNVKGGASFVSGEPNALQDGNGHGTHVAGTVAALNNTTGVLGVAYNADLYAVKVLSASGSGTLSGIAQGIEWSISNGMNVINMSLGGSSGSTALQQACNNAYNRGIVVIAAAGNSGSSGNRNTMGYPARYSSVIAVGAVSSNNTRASFSSVGSELEVMAPGVNILSTTPGNNYASFNGTSMAAPHVAGAAALIKAKYPSMTNVQIRERLKNTATNLGDPFFYGKGVINVESALQ

SEQ ID NO: 69968 - protein, 275 aa, Bacillus sp. LG1
AQTVPWGIPHIKADKAHAAGVTGSGVKVAILDTGIDANHADLNVKGGASFVSGEPNALQDGNGHGTHVAGTVAALNNTTGVLGVAYNADLYAVKVLSASGSGTLSGIAQGIEWSISNGMNVINMSLGGSSGSTALQQACNNAYNRGIVVIAAAGNSGSSGNRNTMGYPARYSSVIAVGATSSNNTRASFSSVGSELEVMAPGVNILSTTPGNNYASFNGTSMAAPHVAGAAALIKAKYPSMTNVQIRERLKNTATNLGDPFFYGKGVINVESALQ

SEQ ID NO: 69969 - protein, 275 aa, Bacillus sp. LG1
AQTVPWGIPHIKADKAHAAGVTGSGVKVAILDTGIDANHADLNVKGGASFVSGEPNALQDGNGHGTHVAGTVAALNNTTGVLGVAYNADLYAVKVLSASGSGTLSGIAQGIEWSISNGMNVINMSLGGSSGSTALQQACNNAYNRGIVVIAAAGNSGSSGNRNTMGYPARYSSVIAVGAVSSNNTRASFSSVGSELEVMAPGVNILSATPGNNYASFNGTSMAAPHVAGAAALIKAKYPSMTNVQIRERLKNTATNLGDPFFYGKGVINVESALQ

SEQ ID NO: 69970 - protein, 275 aa, Bacillus sp. LG1
AQTVPWGIPHIKADKAHAAGVTGSGVKVAILDTGIDANHADLNVKGGASFVSGEPNALQDGNGHGTHVAGTVAALNNTTGVLGVAYNADLYAVKVLSASGSGTLSGIAQGIEWSISNGMNVINMSLGGSSGSTALQQACNNAYNRGIVVIAAAGNQGSSGNRNTMGYPARYSSVIAVGAVSSNNTRASFSSVGSELEVMAPGVNILSTTPGNNYASFNGTSMAAPHVAGAAALIKAKYPSMTNVQIRERLKNTATNLGDPFFYGKGVINVESALQ

SEQ ID NO: 69971 - protein, 275 aa, Bacillus amyloliquefaciens
AQSVPYGVSQIKAPALHSQGYTGSNVKVAVIDSGIDSSHPDLKVAGGASMVPSETNPFQDNNSHGTHVAGTVAALNNSIGVLGVAPSASLYAVKVLVSSGSGQYSWIINGIEWAIANNMDVINMSLGGPSGSAALKAAVDKAVASGVVVVAAAGNEGTSGSSSTVGYPGKYPSVIAVGAVDSSNQRASFSSVGPELDVMAPGVSIQSTLPGNKYGALNGTSMASPHVAGAAALILSKHPNWTNTQVRSSLENTTTKLGDSFYYGKGLINVQAAAQ

SEQ ID NO: 69972 - protein, 275 aa, Bacillus sp. LG1
AQTVPWGIPHIKADKAHAAGVTGSGVKVAILDTGIDNNHADLNVKGGASFVSGEPNALQDGNGHGTHVAGTVAALNNTTGVLGVAYNADLYAVKVLSASGSGTLSGIAQGIEWSISNGMNVINMSLGGSSGSTALQQACNNAYNRGIVVIAAAGNSGSSGNRNTMGYPARYSSVIAVGAVSSNNTRASFSSVGSELEVMAPGVNILSTTPGNNYASFNGTSMAAPHVAGAAALIKAKYPSMTNVQIRERLKNTATNLGDPFFYGKGVINVESALQ

SEQ ID NO: 69973 - protein, 275 aa, Bacillus sp. LG1
AQTVPWGIPHIKADKAHAAGVTGSGVKVAILDTGIDANHADLNVKGGASFVSGEPNALQDGNGHGTHVAGTVAALNNTTGVLGVAYNADLYAVKVLSASGSGTLSGHAQGIEWSISNGMNVINMSLGGSSGSTALQQACNNAYNRGIVVIAAAGNSGSSGNRNTMGYPARYSSVIAVGAVSSNNTRASFSSVGSELEVMAPGVNILSTTPGNNYASFNGTSMAAPHVAGAAALIKAKYPSMTNVQIRERLKNTATNLGDPFFYGKGVINVESALQ

SEQ ID NO: 69974 - protein, 275 aa, Bacillus sp. LG1
AQTVPWGIPHIKAHKAHAAGVTGSGVKVAILDTGIDANHADLNVKGGASFVSGEPNALQDGNGHGTHVAGTVAALNNTTGVLGVAYNADLYAVKVLSASGSGTLSGIAQGIEWSISNGMNVINMSLGGSSGSTALQQACNNAYNRGIVVIAAAGNSGSSGNRNTMGYPARYSSVIAVGAVSSNNTRASFSSVGSELEVMAPGVNILSTTPGNNYASFNGTSMAAPHVAGAAALIKAKYPSMTNVQIRERLKNTATNLGDPFFYGKGVINVESALQ

SEQ ID NO: 69975 - protein, 275 aa, Bacillus sp. LG1
AQTVPWGIPHIKADKAHAAGVTGSGVKVAILDTGIDANHADLNVKGGASFVSGPPNALQDGNGHGTHVAGTVAALNNTTGVLGVAYNADLYAVKVLSASGSGTLSGIAQGIEWSISNGMNVINMSLGGSSGSTALQQACNNAYNRGIVVIAAAGNSGSSGNRNTMGYPARYSSVIAVGAVSSNNTRASFSSVGSELEVMAPGVNILSTTPGNNYASFNGTSMAAPHVAGAAALIKAKYPSMTNVQIRERLKNTATNLGDPFFYGKGVINVESALQ

SEQ ID NO: 69976 - protein, 275 aa, Bacillus sp. LG1
AQTVPWGIPHIKADKAHAAGVTGSGVKVAILDTGIDANHADLNVKGGASFVSGEPNALQDGNGHGTHVAGTVAALNNTTGVLGVAYNADLYAVHVLSASGSGTLSGIAQGIEWSISNGMNVINMSLGGSSGSTALQQACNNAYNRGIVVIAAAGNSGSSGNRNTMGYPARYSSVIAVGAVSSNNTRASFSSVGSELEVMAPGVNILSTTPGNNYASFNGTSMAAPHVAGAAALIKAKYPSMTNVQIRERLKNTATNLGDPFFYGKGVINVESALQ

SEQ ID NO: 69977 - protein, 275 aa, Bacillus sp. LG1
AQTVPWGIGHIKADKAHAAGVTGSGVKVAILDTGIDANHADLNVKGGASFVSGEPNALQDGNGHGTHVAGTVAALNNTTGVLGVAYNADLYAVKVLSASGSGTLSGIAQGIEWSISNGMNVINMSLGGSSGSTALQQACNNAYNRGIVVIAAAGNSGSSGNRNTMGYPARYSSVIAVGAVSSNNTRASFSSVGSELEVMAPGVNILSTTPGNNYASFNGTSMAAPHVAGAAALIKAKYPSMTNVQIRERLKNTATNLGDPFFYGKGVINVESALQ

SEQ ID NO: 69978 - protein, 275 aa, Bacillus sp. LG1
AQTVPWGIPHIKADKAHAAGVTGSGVKVAILDTAIDANHADLNVKGGASFVSGEPNALQDGNGHGTHVAGTVAALNNTTGVLGVAYNADLYAVKVLSASGSGTLSGIAQGIEWSISNGMNVINMSLGGSSGSTALQQACNNAYNRGIVVIAAAGNSGSSGNRNTMGYPARYSSVIAVGAVSSNNTRASFSSVGSELEVMAPGVNILSTTPGNNYASFNGTSMAAPHVAGAAALIKAKYPSMTNVQIRERLKNTATNLGDPFFYGKGVINVESALQ

SEQ ID NO: 69979 - protein, 275 aa, Bacillus sp. LG1
AQTVPWGIPHIKADKAHAAGVTGSGVKVAILDTGIDQNHADLNVKGGASFVSGEPNALQDGNGHGTHVAGTVAALNNTTGVLGVAYNADLYAVKVLSASGSGTLSGIAQGIEWSISNGMNVINMSLGGSSGSTALQQACNNAYNRGIVVIAAAGNSGSSGNRNTMGYPARYSSVIAVGAVSSNNTRASFSSVGSELEVMAPGVNILSTTPGNNYASFNGTSMAAPHVAGAAALIKAKYPSMTNVQIRERLKNTATNLGDPFFYGKGVINVESALQ

SEQ ID NO: 69980 - protein, 275 aa, Bacillus sp. LG1
AQTVPWGIPHIKADKAHAAGVTGSGVKVAILDTGIDANHADLNVKGGASFVSGEPNALQDGNGHGTHVAGTVAALNNTTGVLGVIYNADLYAVKVLSASGSGTLSGIAQGIEWSISNGMNVINMSLGGSSGSTALQQACNNAYNRGIVVIAAAGNSGSSGNRNTMGYPARYSSVIAVGAVSSNNTRASFSSVGSELEVMAPGVNILSTTPGNNYASFNGTSMAAPHVAGAAALIKAKYPSMTNVQIRERLKNTATNLGDPFFYGKGVINVESALQ

SEQ ID NO: 69981 - protein, 275 aa, Bacillus sp. LG1
AQTVPWGIPHIKADKAHAAGVTGSGVKVAILDTGIDANHADLNVKGGASFVSGEPNALQDGNGHGTHVAGTVAALNNTTGVLGVAYNADLYAVKVLSASGSGTLSGIAQGIEWSISNGMNVINMSLGGSSGSTALQQACNNAYNRGIVVIAAAGNSGSSGNRNTMGYPARYSSVIAVGAVSSNNTRASHSSVGSELEVMAPGVNILSTTPGNNYASFNGTSMAAPHVAGAAALIKAKYPSMTNVQIRERLKNTATNLGDPFFYGKGVINVESALQ

SEQ ID NO: 69982 - protein, 275 aa, Bacillus sp. LG1
AQTVPWGIPHIKADKAHAAGVTGSGVKVAILDTGIDANHADLNVKGGASFVSGEPNALQDGNGHGTHVAGTVAALNNTTGVLGVAYNADLYAVKVLSASGSGTLSGIAQGIEWSISNGMNVINMSLGGSSGSTALQQACNNALNRGIVVIAAAGNSGSSGNRNTMGYPARYSSVIAVGAVSSNNTRASFSSVGSELEVMAPGVNILSTTPGNNYASFNGTSMAAPHVAGAAALIKAKYPSMTNVQIRERLKNTATNLGDPFFYGKGVINVESALQ

SEQ ID NO: 69983 - protein, 275 aa, Bacillus sp. LG1
AQTVPWGIPHIKADKAHAAGVTGSGVKVAILDTGIDANHADLNVKGGASFVSGEPNALQDGNGHGTHVAGTVAALNNTTGVLGVAYNADLYAVKVLSASGSGTLSGIAQGIEWSISNGMNVINMSLGGSSGSTALQQACNNAYNRGIVVIAAAGNSGSSGNRNTMGYPARYSSVIAVGAVSSNNTRASESSVGSELEVMAPGVNILSTTPGNNYASFNGTSMAAPHVAGAAALIKAKYPSMTNVQIRERLKNTATNLGDPFFYGKGVINVESALQ

SEQ ID NO: 69984 - protein, 275 aa, Bacillus amyloliquefaciens
AQSVPYGVSLIKAPALHSQGYTGSNVKVAVIDSGIDSSHPDLKVAGGASMVPSETNPFQDNNSHGTHVAGTVAALNNSIGVLGVAPSASLYAVKVLRCSGSGQYSWIINGIEWAIANNMDVINMSLGGPSGSAALKAAVDKAVASGVVVVAAAGNEGTSGSSSTVGYPGKYPSVIAVGAVDSSNQRASFSSVGPELDVMAPGVSIQSTLPGNKYGALNGTSMASPHVAGAAALILSKHPNWTNTQVRSSLENTTTKLGDSFYYGKGLINVQAAAQ

SEQ ID NO: 69985 - protein, 275 aa, Bacillus sp. LG1
AQTVPWGIPHIKADKAHAAGVTGSGVYVAILDTGIDANHADLNVKGGASFVSGEPNALQDGNGHGTHVAGTVAALNNTTGVLGVAYNADLYAVKVLSASGSGTLSGIAQGIEWSISNGMNVINMSLGGSSGSTALQQACNNAYNRGIVVIAAAGNSGSSGNRNTMGYPARYSSVIAVGAVSSNNTRASFSSVGSELEVMAPGVNILSTTPGNNYASFNGTSMAAPHVAGAAALIKAKYPSMTNVQIRERLKNTATNLGDPFFYGKGVINVESALQ

SEQ ID NO: 69986 - protein, 275 aa, Bacillus sp. LG1
AQTVPWGIPHIKADKAHAAGVTGSGVKVAILDTGIDANHADLNVKGGASFVSGEPNALQDGNGHGTHVAGTVAALNNTTGVLGVAYNADLYAVKVLSASGSGTLSGIAQGIEWSISNGMNVINMSLGGSSGSTALQQACNNAYNRGIVVIAAAGNSGSSGNRNTMGYPARYSSVIAVGAVSSNNTRASFSSVGSELEVMAPGVNILSTTPGNNYASFNGTSMAAPHVAGYAALIKAKYPSMTNVQIRERLKNTATNLGDPFFYGKGVINVESALQ

SEQ ID NO: 69987 - protein, 275 aa, Bacillus sp. LG1
AQTVPWGIPHIKADKAHAAGVTGSGVKVAILDTGIDANHADLNVKGGASFVSGEPNALQDGNGHGTHVAGTVAALNNTTGVLGVAYNADLYAVKVLSASGSGTLSGIAQGIEWSISNGMNVINMSLGGSSGSTALQQACNNAYNRGIVVIAAAGNSGSSGNRNTMGYPARYSSVIAVGAVSSNNTRASFSSVGSELEVMAPGVNILSTTPGNNYASFNGTSMAAPHVAGAAALIKAKYPSMTNVQIRERLKNTATNLGDPYFYGKGVINVESALQ

SEQ ID NO: 69988 - protein, 275 aa, Bacillus sp. LG1
AQTVPWGIPHIKADKAHAAGVTGSGVKVAILDTGIDANHADLNVKGGASFVSGEPNALQDGNGHGTHVAGTVAALNNTTGVLGVAYNADLYAVKVLSASGSGTLSGIAQGIEWSISNGMNVINMSLGGSSGSTALQQACNNAYNRGIVVIAAAGNSGSSGNRNTMIYPARYSSVIAVGAVSSNNTRASFSSVGSELEVMAPGVNILSTTPGNNYASFNGTSMAAPHVAGAAALIKAKYPSMTNVQIRERLKNTATNLGDPFFYGKGVINVESALQ

SEQ ID NO: 69989 - protein, 275 aa, Bacillus sp.
AQTVPWGIPHIKADKAHAAGVTGSGVKVAILDTGIDANHDDLNVKGGASFVQGEPNALQDGNGHGTHVAGTVAALDNTTGVLGVAYNADLYAVKVLSASGSGTLSGIAQGIEWSISNGMNVINMSLGSFYGSTALQQACNNAYNRGIVVIAAAGNSGSSGNRNTMGYPARYSSVIAVGAVSSNNTRASFSSVGSELEVMAPGVNILSTTPGNNYASFNGTSMAAPHVAGAAALIKAKFPSMTNVQIRERLKNTATNLGDPFFYGKGVINVESALQ

SEQ ID NO: 69990 - protein, 275 aa, Bacillus sp. LG1
AQTVPWGIPHIKADKAHAAGVTGSGVKVAILDTGIDENHADLNVKGGASFVSGEPNALQDGNGHGTHVAGTVAALNNTTGVLGVAYNADLYAVKVLSASGSGTLSGIAQGIEWSISNGMNVINMSLGGSSGSTALQQACNNAYNRGIVVIAAAGNSGSSGNRNTMGYPARYSSVIAVGAVSSNNTRASFSSVGSELEVMAPGVNILSTTPGNNYASFNGTSMAAPHVAGAAALIKAKYPSMTNVQIRERLKNTATNLGDPFFYGKGVINVESALQ

SEQ ID NO: 69991 - protein, 275 aa, Bacillus sp. LG1
AQTVPWGIPHIKADKAHAAGVTGSGVGVAILDTGIDANHADLNVKGGASFVSGEPNALQDGNGHGTHVAGTVAALNNTTGVLGVAYNADLYAVKVLSASGSGTLSGIAQGIEWSISNGMNVINMSLGGSSGSTALQQACNNAYNRGIVVIAAAGNSGSSGNRNTMGYPARYSSVIAVGAVSSNNTRASFSSVGSELEVMAPGVNILSTTPGNNYASFNGTSMAAPHVAGAAALIKAKYPSMTNVQIRERLKNTATNLGDPFFYGKGVINVESALQ

SEQ ID NO: 69992 - protein, 275 aa, Bacillus sp. LG1
AQTVPWGIPHIKADKAHAAGVTGSGVKVAILDTGIDANHADLNVKGGASFVSGEPNALQDGNGHGTHVAGTIAALNNTTGVLGVAYNADLYAVKVLSASGSGTLSGIAQGIEWSISNGMNVINMSLGGSSGSTALQQACNNAYNRGIVVIAAAGNSGSSGNRNTMGYPARYSSVIAVGAVSSNNTRASFSSVGSELEVMAPGVNILSTTPGNNYASFNGTSMAAPHVAGAAALIKAKYPSMTNVQIRERLKNTATNLGDPFFYGKGVINVESALQ

SEQ ID NO: 69993 - protein, 275 aa, Bacillus sp. LG1
AQTVPWGIPHIKADKAHAAGVTGSGVKVAILDTGIDANHADLNVKGGASFVSGEPNALQDGNGHGTHVAGTVAALNNTTGVLGVAYNADLYAVKVLSASGSGTLSGIAQGIEWSISNGMNVINMSLGGSSGSTALQQACNNAYNRGIVVIAAAGNSGSSGNRNTMGYPARYSSVIAVGAVSSNNTRASFSSVGSELEVMAPGVNILSTTPGNNYASFNGTSMAAPHVAGAAALIKAKYDSMTNVQIRERLKNTATNLGDPFFYGKGVINVESALQ

SEQ ID NO: 69994 - protein, 275 aa, Bacillus sp. LG1
AQTVPWGIPHIKADKAHAAGVTGSGVKVAILDTGIDANHADLNVKGGASFVSGEPNALQDGNGHGTHVAGTVAALNNTTGVLGVAYNADLYAVKVLSASGSGTLSGIAQGIEWSISNGMNVINMSLGGSSGSTALQQACNNAYNRGIQVIAAAGNSGSSGNRNTMGYPARYSSVIAVGAVSSNNTRASFSSVGSELEVMAPGVNILSTTPGNNYASFNGTSMAAPHVAGAAALIKAKYPSMTNVQIRERLKNTATNLGDPFFYGKGVINVESALQ

SEQ ID NO: 69995 - protein, 275 aa, Bacillus sp. LG1
AQTVPWGIPHIKADKAHAAGVTASGVKVAILDTGIDANHADLNVKGGASFVSGEPNALQDGNGHGTHVAGTVAALNNTTGVLGVAYNADLYAVKVLSASGSGTLSGIAQGIEWSISNGMNVINMSLGGSSGSTALQQACNNAYNRGIVVIAAAGNSGSSGNRNTMGYPARYSSVIAVGAVSSNNTRASFSSVGSELEVMAPGVNILSTTPGNNYASFNGTSMAAPHVAGAAALIKAKYPSMTNVQIRERLKNTATNLGDPFFYGKGVINVESALQ

SEQ ID NO: 69996 - protein, 275 aa, Bacillus sp. LG1
AQTVPWYIPHIKADKAHAAGVTGSGVKVAILDTGIDANHADLNVKGGASFVSGEPNALQDGNGHGTHVAGTVAALNNTTGVLGVAYNADLYAVKVLSASGSGTLSGIAQGIEWSISNGMNVINMSLGGSSGSTALQQACNNAYNRGIVVIAAAGNSGSSGNRNTMGYPARYSSVIAVGAVSSNNTRASFSSVGSELEVMAPGVNILSTTPGNNYASFNGTSMAAPHVAGAAALIKAKYPSMTNVQIRERLKNTATNLGDPFFYGKGVINVESALQ

SEQ ID NO: 69997 - protein, 275 aa, Bacillus sp. LG1
AQTVPWGIPHIKADKAHAAGVTGSGVKVAILDTGIDANHADLNVKGGASFVSGRPNALQDGNGHGTHVAGTVAALNNTTGVLGVAYNADLYAVKVLSASGSGTLSGIAQGIEWSISNGMNVINMSLGGSSGSTALQQACNNAYNRGIVVIAAAGNSGSSGNRNTMGYPARYSSVIAVGAVSSNNTRASFSSVGSELEVMAPGVNILSTTPGNNYASFNGTSMAAPHVAGAAALIKAKYPSMTNVQIRERLKNTATNLGDPFFYGKGVINVESALQ

SEQ ID NO: 69998 - protein, 275 aa, Bacillus sp. LG1
AQTVPWGIPHIKADKAHAAGVTGSGVKVAILDTGIDANHADLNVKGGASFVSGEPNALQDGNGHGTHVAGTVAALNNTTGVLGVAYNADLYAVKVLSASGSGTLSGIAQGIEWSISNSMNVINMSLGGSSGSTALQQACNNAYNRGIVVIAAAGNSGSSGNRNTMGYPARYSSVIAVGAVSSNNTRASFSSVGSELEVMAPGVNILSTTPGNNYASFNGTSMAAPHVAGAAALIKAKYPSMTNVQIRERLKNTATNLGDPFFYGKGVINVESALQ

SEQ ID NO: 69999 - protein, 275 aa, Bacillus sp. LG1
AQTVPWGIPHIKADKAHAAGVTGSGVKVAILDTGIDANHADLNVKGGASFVSGEPNALQDGNGHGTHVAGTVAALNNTTGVLGVAYNADLYAVKVLSASGSGTLSGIAQGIEWSISNGMNVINMSLGGSSGSTALQQACNNAYNRGIVVIAAAGNSGSSGNRNTMGYPARYSSVIAVGAVSSNNTRASFSSVGSELEVMAPGVNILSTTPGNNYASFNGTSMAAPHVGGAAALIKAKYPSMTNVQIRERLKNTATNLGDPFFYGKGVINVESALQ

SEQ ID NO: 70000 - protein, 275 aa, Bacillus sp. LG1
AQTVPWGIPHIKADKAHAAGVTGSGVKVAILDTGIDANHADLNVKGGAAFVSGEPNALQDGNGHGTHVAGTVAALNNTTGVLGVAYNADLYAVKVLSASGSGTLSGIAQGIEWSISNGMNVINMSLGGSSGSTALQQACNNAYNRGIVVIAAAGNSGSSGNRNTMGYPARYSSVIAVGAVSSNNTRASFSSVGSELEVMAPGVNILSTTPGNNYASFNGTSMAAPHVAGAAALIKAKYPSMTNVQIRERLKNTATNLGDPFFYGKGVINVESALQ

SEQ ID NO: 70001 - protein, 275 aa, Bacillus sp. LG1
AQTVPWGIPHIKADKAHAAGVTGSGVKVAILDTGIDANHADLNVKGGASFVSGEPNALQDGNGHGTHVAGTVAALNNTTGVLGVAYNADLYAVKVLSASGSGTLSGIAQGIEWSISNGMNVINMSLGGSSGSTALQQACNNAYNRGIVVIAAAGNSGSSGNRNTMGYPARYSSVIAVGAVSSNNTRASFSSVGSELEVMAPGVNILSTTPGNNYASFNGTSMAAPHVAGALALIKAKYPSMTNVQIRERLKNTATNLGDPFFYGKGVINVESALQ

SEQ ID NO: 70002 - protein, 275 aa, Bacillus sp. LG1
AQTVPWGIPHIKADKAHAAGVTGSGVKVAILDTGIDANHADLNVKGGASFVSGEPNALQDGNGHGTHVAGTVAALNNTTGVLGVAYNADLYAVKVLSASGSGTLSGIAQGIEWSISNGMNVINMSLGGSSGSTALQQACNNAYNRGIVVIAAAGNSGSSGNRNTMGYPARYSSVIAVGAVSSNNTRASFSSVGSELEVMAPGVNILSTTLGNNYASFNGTSMAAPHVAGAAALIKAKYPSMTNVQIRERLKNTATNLGDPFFYGKGVINVESALQ

SEQ ID NO: 70003 - protein, 275 aa, Bacillus sp. LG1
AQTVPWGIPHIKADKAHAAGVTGSGVKVAILDTGIDANHADLNVKGGASFVSGEPNALQDGNGHGTHVAGTVAALNNTTGVLGVAYNADLYAVKVLSASGSGTLSGIAQGIEWSISNGMNVINMSLGGSSGSTALQQACNNAYNRGIVVIAAAGNSGSSGNRNTMGYPARYSSVIAVGAVSSNNTRASFSSVGSELEVMAPGVNILSTTFGNNYASFNGTSMAAPHVAGAAALIKAKYPSMTNVQIRERLKNTATNLGDPFFYGKGVINVESALQ

SEQ ID NO: 70004 - protein, 275 aa, Bacillus sp. LG1
AQTVPWGIPHIKADKAHAAGVTGSGVKVAILDTGIDANHADLNVKGGASFVSGEPNALQDGNGHGTHVAGTVAALNNTTGVLGVAYNADLYAVKVLSASGSGTLSGIAQGIEWSISNGMNVINMSLGGSSASTALQQACNNAYNRGIVVIAAAGNSGSSGNRNTMGYPARYSSVIAVGAVSSNNTRASFSSVGSELEVMAPGVNILSTTPGNNYASFNGTSMAAPHVAGAAALIKAKYPSMTNVQIRERLKNTATNLGDPFFYGKGVINVESALQ

SEQ ID NO: 70005 - protein, 275 aa, Bacillus subtilis
AQTTPWGITHINAHKAHSSSVTGSGVKVAVLDTGIDASHEDLNVKGGASFISGEPNALVDTNGHGTHVSGTVAALNNNIGVVGVAYNADLYAVKVLSASGSGTLSGIAQGVEWAIANNMDVINMSLGGSSGSTALKQAVDNAYASGIVVVAAAGNSGTRGRQNTMGYPARYSSVIAVGAVDSNNNRASFSSVGAELEVMAPGVSVLSTVPGGGYASYSGTSMASPHVAGAAALIKAKYPSLSASQIRDRLRNTATYLGDPFYYGNGVINVERALQ

SEQ ID NO: 70006 - protein, 275 aa, Bacillus sp.
AQTVPWGIPHIKADKAHAAGVTGSGVKVAILDTGIDANHADLNVKGGASFVSDEPNALQDGNGHGTHVAGTVAALDNTTGVLGVAYNADLYAVKVLSASGSGTLSGIAQGIEWSISNGMNVINMSLGGSSGSTALQQACNNAYNRGIVVIAAAGNSGSSGNRNTMDYPARYSSVIAVGAVSSNNTRASFSSVGSELEVMAPGVNILSTTPGNNYASFNGTSMAAPHVAGAAALIKAKYPSMTNVQIRKRLKNTATNLGDPFFYGKGVINVEKALQ

SEQ ID NO: 70007 - protein, 275 aa, Bacillus sp. LG1
AQGVPWGIPHIKADKAHAAGVTGSGVKVAILDTGIDANHADLNVKGGASFVSGEPNALQDGNGHGTHVAGTVAALNNTTGVLGVAYNADLYAVKVLSASGSGTLSGIAQGIEWSISNGMNVINMSLGGSSGSTALQQACNNAYNRGIVVIAAAGNSGSSGNRNTMGYPARYSSVIAVGAVSSNNTRASFSSVGSELEVMAPGVNILSTTPGNNYASFNGTSMAAPHVAGAAALIKAKYPSMTNVQIRERLKNTATNLGDPFFYGKGVINVESALQ

SEQ ID NO: 70008 - protein, 275 aa, Bacillus sp. LG1
AQTVPWGIPHIKADKAHAAGVTGSGVKVAILDTGIDANHADLNVKGGASFVSGEPNALQDGNGHGTHVAGTVAALNNTTGVLGVAYNADLYAVKVLSASGSGTLSGIAQGIEWSISNGMNVINMSLGGSSGSTALQQACNNAYNRGIVVIAAAGNSGSSGNRETMGYPARYSSVIAVGAVSSNNTRASFSSVGSELEVMAPGVNILSTTPGNNYASFNGTSMAAPHVAGAAALIKAKYPSMTNVQIRERLKNTATNLGDPFFYGKGVINVESALQ

SEQ ID NO: 70009 - protein, 275 aa, Bacillus sp. LG1
AQTVPWGIPHIKADKAHAAGVTGSGVKVAILDTGIDANHADLNVKGGASFVSGEPNALQDGNGHGTHVAGTVAALNNTTGVLGVAYNADLYAVKVLSASGSGTLSGIAQGIEWSISNGQNVINMSLGGSSGSTALQQACNNAYNRGIVVIAAAGNSGSSGNRNTMGYPARYSSVIAVGAVSSNNTRASFSSVGSELEVMAPGVNILSTTPGNNYASFNGTSMAAPHVAGAAALIKAKYPSMTNVQIRERLKNTATNLGDPFFYGKGVINVESALQ

SEQ ID NO: 70010 - protein, 275 aa, Bacillus sp. LG1
AQTVPWGIPHIKADKAHAAGVTGSGVKVAILDTGIDANHADLNVKGGASFVSGEPNALQDGNGHGTHVAGTVAALNNATGVLGVAYNADLYAVKVLSASGSGTLSGIAQGIEWSISNGMNVINMSLGGSSGSTALQQACNNAYNRGIVVIAAAGNSGSSGNRNTMGYPARYSSVIAVGAVSSNNTRASFSSVGSELEVMAPGVNILSTTPGNNYASFNGTSMAAPHVAGAAALIKAKYPSMTNVQIRERLKNTATNLGDPFFYGKGVINVESALQ

SEQ ID NO: 70011 - protein, 275 aa, Bacillus sp. LG1
AQTVPWGIPHIKADKAHAAGVTGSGVKVAILDTGIDANHADLNVKGGASFVSGEPNALQDGNGHGTHVAGTVAALNNTTGVLGVAYNADLYAVKVLSASGSGTLSGIAQGIEWSISNGMNVINMSLGGSSGSTALQQACNNAYNRGIVVIAAAGNSGSSGNRNTMGEPARYSSVIAVGAVSSNNTRASFSSVGSELEVMAPGVNILSTTPGNNYASFNGTSMAAPHVAGAAALIKAKYPSMTNVQIRERLKNTATNLGDPFFYGKGVINVESALQ

SEQ ID NO: 70012 - protein, 275 aa, Bacillus sp. LG1
AQTVPWGIPHIKADKAHAAGVTGSGVKVAILDTGIDANHADLNVKGGASFVSGEPNALQDGNGHGTHVAGTVAALNNTTGVLGVAYNADLYAVKVLSASGSGTLSGIAQGIEWSISNGMNVINMSLGGSSGSTALQQACNNAYNRGIVVIAAAGNSGSSGNRNTMGYPARYSSVIAVGAVSSNNTRVSFSSVGSELEVMAPGVNILSTTPGNNYASFNGTSMAAPHVAGAAALIKAKYPSMTNVQIRERLKNTATNLGDPFFYGKGVINVESALQ

SEQ ID NO: 70013 - protein, 275 aa, Bacillus sp. LG1
AQTVPWGIPHIKADKAHAAGVTGSGVKVAILDTGIDANHADLNVKGGASFVSGEPNALQDGNGHGTHVAGTVAALNNTTGVLGVAYNADLYAVKVLSASGSGTLSGIAQGIEWSISNGMNVINMSLGGSSGSTALQQACNNAYNRGIVVIAAAGNSGSSGNRNTMGYPARYSSVIAVGAVSSNNTRASFSSVGSELEVMAPGVNILSTTPGNNYASFNGTSMAAPHVAGAAALIKAKYPSMTNVQIRERLKNTATNCGDPFFYGKGVINVESALQ

SEQ ID NO: 70014 - protein, 275 aa, Bacillus sp. LG1
AQTVPWGIPHIKADKAHAAGVTGSGVKVAILDTGIDANHADLNVKGGASFVSGEPNALQDGNGHGTHVAGTVAALNNTTGVLGVAYNADLYAVKVLSASGSGTLSGIAQGIEWSISNGMNVINMSLGGSSGSTALQQACNNAYNRGIAVIAAAGNSGSSGNRNTMGYPARYSSVIAVGAVSSNNTRASFSSVGSELEVMAPGVNILSTTPGNNYASFNGTSMAAPHVAGAAALIKAKYPSMTNVQIRERLKNTATNLGDPFFYGKGVINVESALQ

SEQ ID NO: 70015 - protein, 275 aa, Bacillus sp. LG1
AQTVPWGIPHIKADKAHAAGVTGSGVKVAILDTGIDANHADLNVKGGASFVSGEPNALQDGNGHGTHVAGTVAALNNTTGVLGVAYNADLYAVKVLSASGSGTLSGIAQGIEWSISNGMNVINMSLGGSSGSTALQQACNNAYNRGIVVIAAAGNSGSSGNRNTMGYPARYSSVIAVGAVSSNNTRASFSSVGSELEVMAPGVNILSTTPGNNYASFNGTSMAAPHVAGAAALIKAKYGSMTNVQIRERLKNTATNLGDPFFYGKGVINVESALQ

SEQ ID NO: 70016 - protein, 275 aa, Bacillus amyloliquefaciens
AQSVPYGVSQIKAPALHSQGYTGSNVKVAVIDSGIDSSHPDLKVAGGASMVPSETNPFQDNNGHGTHVAGTVAALNNSIGVLGVAPSASLYAVKVLGADGSGQYSWIINGIEWAIANNMDVINMSLGGPSGSAALKAAVDKAVASGVVVVAAAGNEGTSGSSSTVGYPGKYPSVIAVGAVDSSNQRASFSSVGPELDVMAPGVSILSTWPGNKYAVLNGTSMASPHVAGAAALILSKHPNWTNTQVRSSLENTTTKLGDSFYYGKGLINVQAAAQ

SEQ ID NO: 70017 - protein, 275 aa, Bacillus sp. LG1
AQTVPWGIPHIKADKAHAAGVTGSGVKVAILDTGIDANHADLNVKGGASFVSGEPNALQDGAGHGTHVAGTVAALNNTTGVLGVAYNADLYAVKVLSASGSGTLSGIAQGIEWSISNGMNVINMSLGGSSGSTALQQACNNAYNRGIVVIAAAGNSGSSGNRNTMGYPARYSSVIAVGAVSSNNTRASFSSVGSELEVMAPGVNILSTTPGNNYASFNGTSMAAPHVAGAAALIKAKYPSMTNVQIRERLKNTATNLGDPFFYGKGVINVESALQ

SEQ ID NO: 70018 - protein, 275 aa, Bacillus sp. LG1
AQTVPWGIPHIKADKAHAAGVTGSGVKVAILDTGIDANHADLNVKGGASFVSGEPNALQDGNGHGTHVAGTVAALNNTTGVLGVAYNADLYAVKVLSASGSGTLSGIAQGIEWSISNGMNVINMSLGGSSGSTALQQACNNAYNRGIVVIAAAGNSGSSGMRNTMGYPARYSSVIAVGAVSSNNTRASFSSVGSELEVMAPGVNILSTTPGNNYASFNGTSMAAPHVAGAAALIKAKYPSMTNVQIRERLKNTATNLGDPFFYGKGVINVESALQ

SEQ ID NO: 70019 - protein, 275 aa, Bacillus sp. LG1
AQTVDWGIPHIKADKAHAAGVTGSGVKVAILDTGIDANHADLNVKGGASFVSGEPNALQDGNGHGTHVAGTVAALNNTTGVLGVAYNADLYAVKVLSASGSGTLSGIAQGIEWSISNGMNVINMSLGGSSGSTALQQACNNAYNRGIVVIAAAGNSGSSGNRNTMGYPARYSSVIAVGAVSSNNTRASFSSVGSELEVMAPGVNILSTTPGNNYASFNGTSMAAPHVAGAAALIKAKYPSMTNVQIRERLKNTATNLGDPFFYGKGVINVESALQ

SEQ ID NO: 70020 - protein, 275 aa, Bacillus sp. LG1
AQTVPWGIPHIKADKAHAAGVTGSGVKVAILDTGIDANHADLNVKGGASFVSGEPNALQDGNGHGTHVAGTVAALNNTTGVLGVAYNADLYAVKVLSASGSGTLSGIAQGIEWSISNGMNVINMSLGGSSGSTALQQACNNAYNRGIVVIAAAGNSGSSGNRNTMGYPARYSSVFAVGAVSSNNTRASFSSVGSELEVMAPGVNILSTTPGNNYASFNGTSMAAPHVAGAAALIKAKYPSMTNVQIRERLKNTATNLGDPFFYGKGVINVESALQ

SEQ ID NO: 70021 - protein, 275 aa, Bacillus sp. LG1
AQTVPWGIPHIKADKAHAAGVTGSGVKVAILDTGIDANHADLNVKGGATFVSGEPNALQDGNGHGTHVAGTVAALNNTTGVLGVAYNADLYAVKVLSASGSGTLSGIAQGIEWSISNGMNVINMSLGGSSGSTALQQACNNAYNRGIVVIAAAGNSGSSGNRNTMGYPARYSSVIAVGAVSSNNTRASFSSVGSELEVMAPGVNILSTTPGNNYASFNGTSMAAPHVAGAAALIKAKYPSMTNVQIRERLKNTATNLGDPFFYGKGVINVESALQ

SEQ ID NO: 70022 - protein, 275 aa, Bacillus sp. LG1
AQTVPWGIPHIKADKAHAAGVTGSGVKVAILDTGIDANHADLNVKGGASFVSGEPNALQDGNGHGTHVAGTVAALNNTTGVLGVAYNADLYAVKVLSASGSGTLSGIAQGIEWSISNGMNVINMSLGGSSGSTALQQACNNAYNRGIVVIAAAGNSGSSGNRNTMGYPARYSSVIAVGAVSSNNTRASFSSVGSELEVMAPGVNILSTTPGNNYASFNGTSMAAPHVAGAAALIKAKYPSMTNVQIREKLKNTATNLGDPFFYGKGVINVESALQ

SEQ ID NO: 70023 - protein, 275 aa, Bacillus sp. LG1
AQTVPWGIPHIKADKAHAAGVTGSGVKVAILDTGIDANHADLNVKGGASFVSGGPNALQDGNGHGTHVAGTVAALNNTTGVLGVAYNADLYAVKVLSASGSGTLSGIAQGIEWSISNGMNVINMSLGGSSGSTALQQACNNAYNRGIVVIAAAGNSGSSGNRNTMGYPARYSSVIAVGAVSSNNTRASFSSVGSELEVMAPGVNILSTTPGNNYASFNGTSMAAPHVAGAAALIKAKYPSMTNVQIRERLKNTATNLGDPFFYGKGVINVESALQ

SEQ ID NO: 70024 - protein, 275 aa, Bacillus sp. LG1
AQTVPWGIPHIDADKAHAAGVTGSGVKVAILDTGIDANHADLNVKGGASFVSGEPNALQDGNGHGTHVAGTVAALNNTTGVLGVAYNADLYAVKVLSASGSGTLSGIAQGIEWSISNGMNVINMSLGGSSGSTALQQACNNAYNRGIVVIAAAGNSGSSGNRNTMGYPARYSSVIAVGAVSSNNTRASFSSVGSELEVMAPGVNILSTTPGNNYASFNGTSMAAPHVAGAAALIKAKYPSMTNVQIRERLKNTATNLGDPFFYGKGVINVESALQ

SEQ ID NO: 70025 - protein, 275 aa, Bacillus sp. LG1
AQTVPWGIPHIKADKAHAAGVTGSGVKVAILDTGIDANHADLNVKGGASFVSGEPNALQDGNGHGTHVAGTVAALNNTTGVLGVAYNADLYAVKVLSASGSGTLSGIAQGIEWSISNGMNVINMSLGGSSGSTALQQACNNAYNRGIVVIAAAGNSGSSGNRNTMGYPARYSSVIAVGAVSSNNTRASFSSVGSELEVMAPGVNILSTTPGNNYASFNGTSMAAPHVAGAAALIKAKYPSMTNVQIRERLKNTANNLGDPFFYGKGVINVESALQ

SEQ ID NO: 70026 - protein, 275 aa, Bacillus sp. LG1
AQTVPWGIPHIKADKAHAAVVTGSGVKVAILDTGIDANHADLNVKGGASFVSGEPNALQDGNGHGTHVAGTVAALNNTTGVLGVAYNADLYAVKVLSASGSGTLSGIAQGIEWSISNGMNVINMSLGGSSGSTALQQACNNAYNRGIVVIAAAGNSGSSGNRNTMGYPARYSSVIAVGAVSSNNTRASFSSVGSELEVMAPGVNILSTTPGNNYASFNGTSMAAPHVAGAAALIKAKYPSMTNVQIRERLKNTATNLGDPFFYGKGVINVESALQ

SEQ ID NO: 70027 - protein, 275 aa, Bacillus sp. LG1
AQTVPWGIPHIKADKAHAAGVTGSGVKVAILDTGIDANHADLNVKGGASFVSGEPNALQDGNGHGTHVAGTVAALNNTTGVLGVAYNADLYAVKVLSASGSGTLSGIAQGIEWSISNGMNVINMSLGGSSGSTALQQACNNAYNRGIVVIAAAGNSGSSGNRNTMGYPARYSSVIAVGAVSSNNTRASFSSVGSELDVMAPGVNILSTTPGNNYASFNGTSMAAPHVAGAAALIKAKYPSMTNVQIRERLKNTATNLGDPFFYGKGVINVESALQ

SEQ ID NO: 70028 - protein, 275 aa, Bacillus sp. LG1
AQTVPWGIPHIKADKAHAAGVTGSGVKVAILDTGIDANHADLNVKGGASFVSGEPNALQDGNGHGTHVAGTVAALNNTTGVLGVAYNADLYAVKVLSASGSGTLSGIAQGIEWSISNGMNVINMSLGGSSGSTALQQACNNAYNRGIVVIAAAGNSGSSGNRNTMGYPARYSSVVAVGAVSSNNTRASFSSVGSELEVMAPGVNILSTTPGNNYASFNGTSMAAPHVAGAAALIKAKYPSMTNVQIRERLKNTATNLGDPFFYGKGVINVESALQ

SEQ ID NO: 70029 - protein, 275 aa, Bacillus sp. LG1
AQTVPWGIPHIKADKAHAAGVTGSGVKVAILDTGIDANHADLNVKGGASFVSGEPNALQDGNGHGTHVAGTVAALNNTTGVLGVAYNADLYAVKVLSASGSGTLSGIAQGIEWSISNGMNVINMSLGGSTGSTALQQACNNAYNRGIVVIAAAGNSGSSGNRNTMGYPARYSSVIAVGAVSSNNTRASFSSVGSELEVMAPGVNILSTTPGNNYASFNGTSMAAPHVAGAAALIKAKYPSMTNVQIRERLKNTATNLGDPFFYGKGVINVESALQ

SEQ ID NO: 70030 - protein, 275 aa, Bacillus sp. LG1
AQTVPWGIPHIKADKAHAAGVTGSGVKVAIADTGIDANHADLNVKGGASFVSGEPNALQDGNGHGTHVAGTVAALNNTTGVLGVAYNADLYAVKVLSASGSGTLSGIAQGIEWSISNGMNVINMSLGGSSGSTALQQACNNAYNRGIVVIAAAGNSGSSGNRNTMGYPARYSSVIAVGAVSSNNTRASFSSVGSELEVMAPGVNILSTTPGNNYASFNGTSMAAPHVAGAAALIKAKYPSMTNVQIRERLKNTATNLGDPFFYGKGVINVESALQ

SEQ ID NO: 70031 - protein, 275 aa, Bacillus sp. LG1
AQTVPWGIPHIKADKAHAAGVTGSGVKVAILDTGIDANHADLNVKGGASFVSEEPNALQDGNGHGTHVAGTVAALNNTTGVLGVAYNADLYAVKVLSASGSGTLSGIAQGIEWSISNGMNVINMSLGGSSGSTALQQACNNAYNRGIVVIAAAGNSGSSGNRNTMGYPARYSSVIAVGAVSSNNTRASFSSVGSELEVMAPGVNILSTTPGNNYASFNGTSMAAPHVAGAAALIKAKYPSMTNVQIRERLKNTATNLGDPFFYGKGVINVESALQ

SEQ ID NO: 70032 - protein, 275 aa, Bacillus sp. LG1
AQTVPWGIPHIKADKAHAAGVTGSGVKVAILDTGIDANHADLNVKGGASFVSGEPNALQDGNGHGTHVAGTVAALNNTTGVLGVAYNADLYAVKVLSASGSGTLSGIAQGIEWSISNGMNVINMSDGGSSGSTALQQACNNAYNRGIVVIAAAGNSGSSGNRNTMGYPARYSSVIAVGAVSSNNTRASFSSVGSELEVMAPGVNILSTTPGNNYASFNGTSMAAPHVAGAAALIKAKYPSMTNVQIRERLKNTATNLGDPFFYGKGVINVESALQ

SEQ ID NO: 70033 - protein, 275 aa, Bacillus sp. LG1
AQTVPWGIPHIKADKAHAAGVTGSGVKVAILDTGIDANHADLNVKGGASFVSGEPNALQDGLGHGTHVAGTVAALNNTTGVLGVAYNADLYAVKVLSASGSGTLSGIAQGIEWSISNGMNVINMSLGGSSGSTALQQACNNAYNRGIVVIAAAGNSGSSGNRNTMGYPARYSSVIAVGAVSSNNTRASFSSVGSELEVMAPGVNILSTTPGNNYASFNGTSMAAPHVAGAAALIKAKYPSMTNVQIRERLKNTATNLGDPFFYGKGVINVESALQ

SEQ ID NO: 70034 - protein, 275 aa, Bacillus sp. LG1
AQTVPWGIPHIKADKAHAAGVTGSGVKVAILDTGIDANHADLNVKGGASSVSGEPNALQDGNGHGTHVAGTVAALNNTTGVLGVAYNADLYAVKVLSASGSGTLSGIAQGIEWSISNGMNVINMSLGGSSGSTALQQACNNAYNRGIVVIAAAGNSGSSGNRNTMGYPARYSSVIAVGAVSSNNTRASFSSVGSELEVMAPGVNILSTTPGNNYASFNGTSMAAPHVAGAAALIKAKYPSMTNVQIRERLKNTATNLGDPFFYGKGVINVESALQ

SEQ ID NO: 70035 - protein, 275 aa, Bacillus sp. LG1
AQTVPWGIPHIKADKAHAAGVTGSGVKVAILDTGIDANHADLNVKGGASFVSGEPNALQDGNGHGTPVAGTVAALNNTTGVLGVAYNADLYAVKVLSASGSGTLSGIAQGIEWSISNGMNVINMSLGGSSGSTALQQACNNAYNRGIVVIAAAGNSGSSGNRNTMGYPARYSSVIAVGAVSSNNTRASFSSVGSELEVMAPGVNILSTTPGNNYASFNGTSMAAPHVAGAAALIKAKYPSMTNVQIRERLKNTATNLGDPFFYGKGVINVESALQ

SEQ ID NO: 70036 - protein, 275 aa, Bacillus sp. LG1
AQTVPWGIPHIKADKAHAAGVTGSGVKVAILDTGIDANHADLNVKGGISFVSGEPNALQDGNGHGTHVAGTVAALNNTTGVLGVAYNADLYAVKVLSASGSGTLSGIAQGIEWSISNGMNVINMSLGGSSGSTALQQACNNAYNRGIVVIAAAGNSGSSGNRNTMGYPARYSSVIAVGAVSSNNTRASFSSVGSELEVMAPGVNILSTTPGNNYASFNGTSMAAPHVAGAAALIKAKYPSMTNVQIRERLKNTATNLGDPFFYGKGVINVESALQ

SEQ ID NO: 70037 - protein, 275 aa, Bacillus sp. LG1
AQTVPWGIPHIKADKAHAAGVTGSGVKVAILDTGIDANHADLNVKGGQSFVSGEPNALQDGNGHGTHVAGTVAALNNTTGVLGVAYNADLYAVKVLSASGSGTLSGIAQGIEWSISNGMNVINMSLGGSSGSTALQQACNNAYNRGIVVIAAAGNSGSSGNRNTMGYPARYSSVIAVGAVSSNNTRASFSSVGSELEVMAPGVNILSTTPGNNYASFNGTSMAAPHVAGAAALIKAKYPSMTNVQIRERLKNTATNLGDPFFYGKGVINVESALQ

SEQ ID NO: 70038 - protein, 275 aa, Bacillus sp. LG1
AQTVPWGIPHIKADKAHAAGVTGSGVKVAILDTGIDANHADLNVKGGASFVSGEPNALQDGNGHGTHVAGTVAALNNTTGVLGVAYNADLYAVKVLSASGSGTLSGIAQGIEHSISNGMNVINMSLGGSSGSTALQQACNNAYNRGIVVIAAAGNSGSSGNRNTMGYPARYSSVIAVGAVSSNNTRASFSSVGSELEVMAPGVNILSTTPGNNYASFNGTSMAAPHVAGAAALIKAKYPSMTNVQIRERLKNTATNLGDPFFYGKGVINVESALQ

SEQ ID NO: 70039 - protein, 275 aa, Bacillus sp. LG1
AQTVPWGIPHIKADKAHAAGVTGSGVKVAILDTGIDANHADLNVKGGASFVSGEPNALQDGNGHGTHVAGTVAALNNTTGVLGVAYNADLYAVKVLSASGSGTLSGIAQGIEWSISNGMNVINMSLGGSSGSTALQQACNNAYNRGIVVIAAAGNSGSSGNRNTMGYPARYSSVIAVGAVSSNNTRASFSSVGSELEVMAPGVNILSTTPGNNYASFNGTSMAAPHVAGAAALIKALYPSMTNVQIRERLKNTATNLGDPFFYGKGVINVESALQ

SEQ ID NO: 70040 - protein, 275 aa, Bacillus sp. LG1
AQTVPWGIPHIKADKAHAAGVTGSGVKVAILDTGIDANHADLNVKGGASFVSNEPNALQDGNGHGTHVAGTVAALNNTTGVLGVAYNADLYAVKVLSASGSGTLSGIAQGIEWSISNGMNVINMSLGGSSGSTALQQACNNAYNRGIVVIAAAGNSGSSGNRNTMGYPARYSSVIAVGAVSSNNTRASFSSVGSELEVMAPGVNILSTTPGNNYASFNGTSMAAPHVAGAAALIKAKYPSMTNVQIRERLKNTATNLGDPFFYGKGVINVESALQ

SEQ ID NO: 70041 - protein, 275 aa, Bacillus sp. LG1
AQTVPWGIPHIKADKAHAAGVTGSGVKVAILDTGIDANHADLNVKGGASFVSGEPNALQDGNGHGTHVAGTVAALNNLTGVLGVAYNADLYAVKVLSASGSGTLSGIAQGIEWSISNGMNVINMSLGGSSGSTALQQACNNAYNRGIVVIAAAGNSGSSGNRNTMGYPARYSSVIAVGAVSSNNTRASFSSVGSELEVMAPGVNILSTTPGNNYASFNGTSMAAPHVAGAAALIKAKYPSMTNVQIRERLKNTATNLGDPFFYGKGVINVESALQ

SEQ ID NO: 70042 - protein, 275 aa, Bacillus sp. LG1
AQTVPWGIPHIKADKAHAAGVTGSGVKVAILDTGIDANHADLNVKGGASFVSGEPNALQDGNGHGSHVAGTVAALNNTTGVLGVAYNADLYAVKVLSASGSGTLSGIAQGIEWSISNGMNVINMSLGGSSGSTALQQACNNAYNRGIVVIAAAGNSGSSGNRNTMGYPARYSSVIAVGAVSSNNTRASFSSVGSELEVMAPGVNILSTTPGNNYASFNGTSMAAPHVAGAAALIKAKYPSMTNVQIRERLKNTATNLGDPFFYGKGVINVESALQ

SEQ ID NO: 70043 - protein, 275 aa, Bacillus sp. LG1
AQTVPWGIPHIKADKAHAAGVTGSGVKVAILDNGIDANHADLNVKGGASFVSGEPNALQDGNGHGTHVAGTVAALNNTTGVLGVAYNADLYAVKVLSASGSGTLSGIAQGIEWSISNGMNVINMSLGGSSGSTALQQACNNAYNRGIVVIAAAGNSGSSGNRNTMGYPARYSSVIAVGAVSSNNTRASFSSVGSELEVMAPGVNILSTTPGNNYASFNGTSMAAPHVAGAAALIKAKYPSMTNVQIRERLKNTATNLGDPFFYGKGVINVESALQ

SEQ ID NO: 70044 - protein, 275 aa, Bacillus sp. LG1
AQTVPWGIPHIKADKAHAAGVTGSGVKVLILDTGIDANHADLNVKGGASFVSGEPNALQDGNGHGTHVAGTVAALNNTTGVLGVAYNADLYAVKVLSASGSGTLSGIAQGIEWSISNGMNVINMSLGGSSGSTALQQACNNAYNRGIVVIAAAGNSGSSGNRNTMGYPARYSSVIAVGAVSSNNTRASFSSVGSELEVMAPGVNILSTTPGNNYASFNGTSMAAPHVAGAAALIKAKYPSMTNVQIRERLKNTATNLGDPFFYGKGVINVESALQ

SEQ ID NO: 70045 - protein, 275 aa, Bacillus sp. LG1
AQTVPWGIPHIKADKAHAAGVTGSGVKVAILDTGIDANHADLNVKGGASFVSGEPNALQEGNGHGTHVAGTVAALNNTTGVLGVAYNADLYAVKVLSASGSGTLSGIAQGIEWSISNGMNVINMSLGGSSGSTALQQACNNAYNRGIVVIAAAGNSGSSGNRNTMGYPARYSSVIAVGAVSSNNTRASFSSVGSELEVMAPGVNILSTTPGNNYASFNGTSMAAPHVAGAAALIKAKYPSMTNVQIRERLKNTATNLGDPFFYGKGVINVESALQ

SEQ ID NO: 70046 - protein, 275 aa, Bacillus sp. LG1
AQTVPWGIPHIKADKAHAAGVTGSGVKVAILDTGIDANHADLNVKGGASFVSGEPNALQDGNGHGTHVAGTVAALNNTTGVLGVAYNADLYAVKVLSASGSGTLSGIAQGIEWSISNGMNVINMSLGGSSGSTALQQACNNAYNRGIVVIAAAGNSGSSGNRNTMGYPARYSSVIAVGAVSSNNTRASFSSVGSELEVMAPGVNILSTTPGNNYASFNGTSMAAPHVAGAAALIKAKYPSMTNVQIRERLKNTADNLGDPFFYGKGVINVESALQ

SEQ ID NO: 70047 - protein, 275 aa, Bacillus sp. LG1
AQTVPWGIPHIKADKAHAAGVTGSGVKVAILDTGIDANHADLNVKGGASFVSGEPNALQDGNGHGTHVAGTVAALNNTTGVLGVAYNADLYAVKVLSASGSGTLSGIAQGIEWSISNGMNVINMSLGGSSGSTALQQACNNAYNRGIVVIAAAGNSGSSGNRNTMGYPARYSSVIAVGAVSSNNTRASFSSVGSELEVMAPGVNILSTTPGNNYASFNGTSMAAPHVAGAAALIKAKYPSMTNVQIRERLKNTATNLGDPFFYGKGVIKVESALQ

SEQ ID NO: 70048 - protein, 275 aa, Bacillus sp. LG1
AQTVPWGIPHIKADKAHAAGVTGSGVKVAILDTGIDANHADLNVKGGASFVSGEPNALQDGNGHGTHVAGTVAALNNTTGVLGVAYNADLYAVKVLSASGSGTLSGIAQGIEWSISNGMNVINMSLGGSSGSTALQQACNNAYNRGIVVIAAAGNSGSSGNRNTMGYPARYSSVIAVGAVSSNNTRASFSSVGSELEVMAPGVNILSTTPGFNYASFNGTSMAAPHVAGAAALIKAKYPSMTNVQIRERLKNTATNLGDPFFYGKGVINVESALQ

SEQ ID NO: 70049 - protein, 275 aa, Bacillus sp. LG1
AQTVPWGIPHIKADKAHAAGVTGSGVKVAILDTGIDANHADLNVKGGASFVSGEPNALQDGNGHGTHVAGTVAALNNTTGVLGVAYNADLYAVKVLSASGSGTLSGIAQGIEWSISNGMNVINMSLGGSSGSTALQQACNNAYNRGIVLIAAAGNSGSSGNRNTMGYPARYSSVIAVGAVSSNNTRASFSSVGSELEVMAPGVNILSTTPGNNYASFNGTSMAAPHVAGAAALIKAKYPSMTNVQIRERLKNTATNLGDPFFYGKGVINVESALQ

SEQ ID NO: 70050 - protein, 275 aa, Bacillus sp. LG1
AQTVPWGIPHIKADKAHAAGVTGSGRKVAILDTGIDANHADLNVKGGASFVSGEPNALQDGNGHGTHVAGTVAALNNTTGVLGVAYNADLYAVKVLSASGSGTLSGIAQGIEWSISNGMNVINMSLGGSSGSTALQQACNNAYNRGIVVIAAAGNSGSSGNRNTMGYPARYSSVIAVGAVSSNNTRASFSSVGSELEVMAPGVNILSTTPGNNYASFNGTSMAAPHVAGAAALIKAKYPSMTNVQIRERLKNTATNLGDPFFYGKGVINVESALQ

SEQ ID NO: 70051 - protein, 275 aa, Bacillus sp. LG1
AQTVPWGIPHIKADKAHAAGVTGSGVKNAILDTGIDANHADLNVKGGASFVSGEPNALQDGNGHGTHVAGTVAALNNTTGVLGVAYNADLYAVKVLSASGSGTLSGIAQGIEWSISNGMNVINMSLGGSSGSTALQQACNNAYNRGIVVIAAAGNSGSSGNRNTMGYPARYSSVIAVGAVSSNNTRASFSSVGSELEVMAPGVNILSTTPGNNYASFNGTSMAAPHVAGAAALIKAKYPSMTNVQIRERLKNTATNLGDPFFYGKGVINVESALQ

SEQ ID NO: 70052 - protein, 275 aa, Bacillus sp. LG1
AQTVPWGIPHIKADKAHAAGVTGSGVKVAILDTGIDANHADLNVKGGASFVSGEPNALQDGNGHGTHVAGTVAALNNTTGVLGVAYNADLYAVKVLSASGSGTLSGIAQGIEWSISNGMNVINMSLGGSSGSTALQQACNNAYNRGIVVIAAAINSGSSGNRNTMGYPARYSSVIAVGAVSSNNTRASFSSVGSELEVMAPGVNILSTTPGNNYASFNGTSMAAPHVAGAAALIKAKYPSMTNVQIRERLKNTATNLGDPFFYGKGVINVESALQ

SEQ ID NO: 70053 - protein, 275 aa, Bacillus sp. LG1
AQTVPWGIPHIKADKAHAAGVTGSGVKVAILDTGIDANHADLNVKGGASFVSGEPNALQDGNFHGTHVAGTVAALNNTTGVLGVAYNADLYAVKVLSASGSGTLSGIAQGIEWSISNGMNVINMSLGGSSGSTALQQACNNAYNRGIVVIAAAGNSGSSGNRNTMGYPARYSSVIAVGAVSSNNTRASFSSVGSELEVMAPGVNILSTTPGNNYASFNGTSMAAPHVAGAAALIKAKYPSMTNVQIRERLKNTATNLGDPFFYGKGVINVESALQ

SEQ ID NO: 70054 - protein, 275 aa, Bacillus sp. LG1
AQTVPWGIPHIKADKAHAAGVTGSGVKVAILDTGIDANHADLNVKGGASFVSGEPNALQDGNGHGTHVAGTVAALNNTTGVLGVAYNADLYAVKVLSASGSGTLSGIAQGIEWSISNGMNVINMSLGGSSGSTALQQACNNAYNRGILVIAAAGNSGSSGNRNTMGYPARYSSVIAVGAVSSNNTRASFSSVGSELEVMAPGVNILSTTPGNNYASFNGTSMAAPHVAGAAALIKAKYPSMTNVQIRERLKNTATNLGDPFFYGKGVINVESALQ

SEQ ID NO: 70055 - protein, 275 aa, Bacillus sp. LG1
AQTVPWGIPHIKADKAHAAGVTGSGVKVAILDTGIDANHADLNVKGGASFVSGEPNALQDGNGHGTHVAGTVAALNNTTGVLGVAYNADLYAVKVYSASGSGTLSGIAQGIEWSISNGMNVINMSLGGSSGSTALQQACNNAYNRGIVVIAAAGNSGSSGNRNTMGYPARYSSVIAVGAVSSNNTRASFSSVGSELEVMAPGVNILSTTPGNNYASFNGTSMAAPHVAGAAALIKAKYPSMTNVQIRERLKNTATNLGDPFFYGKGVINVESALQ

SEQ ID NO: 70056 - protein, 275 aa, Bacillus sp. LG1
AQTVPWGIIHIKADKAHAAGVTGSGVKVAILDTGIDANHADLNVKGGASFVSGEPNALQDGNGHGTHVAGTVAALNNTTGVLGVAYNADLYAVKVLSASGSGTLSGIAQGIEWSISNGMNVINMSLGGSSGSTALQQACNNAYNRGIVVIAAAGNSGSSGNRNTMGYPARYSSVIAVGAVSSNNTRASFSSVGSELEVMAPGVNILSTTPGNNYASFNGTSMAAPHVAGAAALIKAKYPSMTNVQIRERLKNTATNLGDPFFYGKGVINVESALQ

SEQ ID NO: 70057 - protein, 275 aa, Bacillus sp. LG1
AQTVPWGIPHIKADKAHAAGVTGSGVSVAILDTGIDANHADLNVKGGASFVSGEPNALQDGNGHGTHVAGTVAALNNTTGVLGVAYNADLYAVKVLSASGSGTLSGIAQGIEWSISNGMNVINMSLGGSSGSTALQQACNNAYNRGIVVIAAAGNSGSSGNRNTMGYPARYSSVIAVGAVSSNNTRASFSSVGSELEVMAPGVNILSTTPGNNYASFNGTSMAAPHVAGAAALIKAKYPSMTNVQIRERLKNTATNLGDPFFYGKGVINVESALQ

SEQ ID NO: 70058 - protein, 275 aa, Bacillus sp. LG1
AQTVPWGIPHIKADKAHAAGVTGSGVKVAILDTGIDANHADLNVKGGASFYSGEPNALQDGNGHGTHVAGTVAALNNTTGVLGVAYNADLYAVKVLSASGSGTLSGIAQGIEWSISNGMNVINMSLGGSSGSTALQQACNNAYNRGIVVIAAAGNSGSSGNRNTMGYPARYSSVIAVGAVSSNNTRASFSSVGSELEVMAPGVNILSTTPGNNYASFNGTSMAAPHVAGAAALIKAKYPSMTNVQIRERLKNTATNLGDPFFYGKGVINVESALQ

SEQ ID NO: 70059 - protein, 275 aa, Bacillus sp. LG1
AQTVPWGIPHIKADKAHAAGVTGSGVKVAILDTGIDANHADLNVKGGASFVSGEPNALQDGNGHGTHVAGTVAALNNTTGVLGVAYNADEYAVKVLSASGSGTLSGIAQGIEWSISNGMNVINMSLGGSSGSTALQQACNNAYNRGIVVIAAAGNSGSSGNRNTMGYPARYSSVIAVGAVSSNNTRASFSSVGSELEVMAPGVNILSTTPGNNYASFNGTSMAAPHVAGAAALIKAKYPSMTNVQIRERLKNTATNLGDPFFYGKGVINVESALQ

SEQ ID NO: 70060 - protein, 274 aa, Bacillus amyloliquefaciens
AQSVPYGVSQIKAPALHSQGYTGSNVKVAVIDSGIDSSHPDLKVAGGASMVPGESAFQDNNSHGTHVAGTVAALNNSTGVLGVAPSASLYAVKVLGADGSGQYSWIINGIEWAIANNMDVINMSLGGPSGSAALKAAVDKAVASGVVVVAAAGNEGTSGSSSTVGYPGKYPSVIAVGAVDSSNQRASFSSVGPELDVMAPGVSIQSTLPGNKYGALNGTSMASPHVAGAAALILSKHPNWTNTQVRSSLENTTTKLGDSFYYGKGLINVQAAAQ

SEQ ID NO: 70061 - protein, 275 aa, Bacillus sp. LG1
AQTVPWGIPHIKADKAHAAGVTGSGVPVAILDTGIDANHADLNVKGGASFVSGEPNALQDGNGHGTHVAGTVAALNNTTGVLGVAYNADLYAVKVLSASGSGTLSGIAQGIEWSISNGMNVINMSLGGSSGSTALQQACNNAYNRGIVVIAAAGNSGSSGNRNTMGYPARYSSVIAVGAVSSNNTRASFSSVGSELEVMAPGVNILSTTPGNNYASFNGTSMAAPHVAGAAALIKAKYPSMTNVQIRERLKNTATNLGDPFFYGKGVINVESALQ

SEQ ID NO: 70062 - protein, 275 aa, Bacillus sp. LG1
AQTVPWGIPHIKADKAHAAGVTGSGVKVAILDTGIDANHADLNVKGGASFVSGEPNALQDGNGHGTHVAGTVAALNNTTGVLGVAYNADLYAVKVLSASGSGTLSGIAQGIEWSISNGMNVINMSLGGSSGSTALQQACNNAYNRGIVVIAAAGNSGSEGNRNTMGYPARYSSVIAVGAVSSNNTRASFSSVGSELEVMAPGVNILSTTPGNNYASFNGTSMAAPHVAGAAALIKAKYPSMTNVQIRERLKNTATNLGDPFFYGKGVINVESALQ

SEQ ID NO: 70063 - protein, 275 aa, Bacillus sp. LG1
AQTVPWGIPHIKADKAHAAGVTGSGVKVAILDTGIDMNHADLNVKGGASFVSGEPNALQDGNGHGTHVAGTVAALNNTTGVLGVAYNADLYAVKVLSASGSGTLSGIAQGIEWSISNGMNVINMSLGGSSGSTALQQACNNAYNRGIVVIAAAGNSGSSGNRNTMGYPARYSSVIAVGAVSSNNTRASFSSVGSELEVMAPGVNILSTTPGNNYASFNGTSMAAPHVAGAAALIKAKYPSMTNVQIRERLKNTATNLGDPFFYGKGVINVESALQ

SEQ ID NO: 70064 - protein, 275 aa, Bacillus sp. LG1
AQTVPWGIPHIKADKAHAAGVTGSGVKVAILDTGIDANHADLNVKGGASFVSGEPNALQDGNGHGTHVAGTVAALNNTTGVLGTAYNADLYAVKVLSASGSGTLSGIAQGIEWSISNGMNVINMSLGGSSGSTALQQACNNAYNRGIVVIAAAGNSGSSGNRNTMGYPARYSSVIAVGAVSSNNTRASFSSVGSELEVMAPGVNILSTTPGNNYASFNGTSMAAPHVAGAAALIKAKYPSMTNVQIRERLKNTATNLGDPFFYGKGVINVESALQ

SEQ ID NO: 70065 - protein, 275 aa, Bacillus sp. LG1
AQTVPWGIPHIKADKAHAAGVTGSGVKVAILDTGIDANHADLNVKGGASFVSGEPNALQDGNGHGTHVAGTVAALNNTTGVLGVAYNADLYAVKVLSASGSGTLSGIAQGIEWSISNGMNVINMSLGGSSGSTALQQACNNAYNRGIVVIAAAGNSGSSGNRNTMGYPARYSSVIAVGAVSSNNTRWSFSSVGSELEVMAPGVNILSTTPGNNYASFNGTSMAAPHVAGAAALIKAKYPSMTNVQIRERLKNTATNLGDPFFYGKGVINVESALQ

SEQ ID NO: 70066 - protein, 275 aa, Bacillus sp. LG1
AQTVPWGIPHIKADMAHAAGVTGSGVKVAILDTGIDANHADLNVKGGASFVSGEPNALQDGNGHGTHVAGTVAALNNTTGVLGVAYNADLYAVKVLSASGSGTLSGIAQGIEWSISNGMNVINMSLGGSSGSTALQQACNNAYNRGIVVIAAAGNSGSSGNRNTMGYPARYSSVIAVGAVSSNNTRASFSSVGSELEVMAPGVNILSTTPGNNYASFNGTSMAAPHVAGAAALIKAKYPSMTNVQIRERLKNTATNLGDPFFYGKGVINVESALQ

SEQ ID NO: 70067 - protein, 275 aa, Bacillus sp. LG1
AQTVPWGIPHIKADKAHAAGVTGSGVKVAILDTGIDANHADLNVKNGASFVSGEPNALQDGNGHGTHVAGTVAALNNTTGVLGVAYNADLYAVKVLSASGSGTLSGIAQGIEWSISNGMNVINMSLGGSSGSTALQQACNNAYNRGIVVIAAAGNSGSSGNRNTMGYPARYSSVIAVGAVSSNNTRASFSSVGSELEVMAPGVNILSTTPGNNYASFNGTSMAAPHVAGAAALIKAKYPSMTNVQIRERLKNTATNLGDPFFYGKGVINVESALQ

SEQ ID NO: 70068 - protein, 275 aa, Bacillus sp.
AQTVPWGIPHIKADKAHAAGVTGSGVKVAILDTGIDANHADLNVKGGASFVSGEPNALQDGNGHGTHVAGTVAALNNTTGVLGVAYNADLYAVKVLSASGSGTLSGIAQGIEWSISNGMNVINMSLGGSSGSTALQQACDNAYNRGIVVIAAAGNSGSDGNRNTMYYPARYSSVIAVGAVSSNNQRASFSSVGSELEVMAPGVNILSTTPGNNYASFNGTSMAAPHVAGAAALIKAKYPSMTNVQIRERLKNTATNLGDPFFYGKGVINVESALQ

SEQ ID NO: 70069 - protein, 275 aa, Bacillus sp. LG1
AQTVPWGIPHIKADKAHAAGVTGSGVKVAILDTGIDANHADLNVKGGASFVSGEPNALQDGNGHGTHVAGTVAALNNTTGVLGVAYNADLYAVKVLSASGSGTLSGIAQGIEWSISNGMNVINMSLGGSSGSTALQQACNNAYNRGIVVIAAAGNSGSSGNRNTMGYPARYSSVIAVGAVSSNNTRASFSSVGSELEVMAPGVNILSVTPGNNYASFNGTSMAAPHVAGAAALIKAKYPSMTNVQIRERLKNTATNLGDPFFYGKGVINVESALQ

SEQ ID NO: 70070 - protein, 275 aa, Bacillus sp. LG1
AQTVPWGIPHIKADKAHAAGVTGSGVKVAILDTGIDANHADLNVKGGASFVSGEPNALQDGNGHGTHVAGTVAALNNTTGVLGVAYNADLYAVMVLSASGSGTLSGIAQGIEWSISNGMNVINMSLGGSSGSTALQQACNNAYNRGIVVIAAAGNSGSSGNRNTMGYPARYSSVIAVGAVSSNNTRASFSSVGSELEVMAPGVNILSTTPGNNYASFNGTSMAAPHVAGAAALIKAKYPSMTNVQIRERLKNTATNLGDPFFYGKGVINVESALQ

SEQ ID NO: 70071 - protein, 275 aa, Bacillus sp. LG1
AQTVPWGIPHIKADKAHAAGVTGSGVHVAILDTGIDANHADLNVKGGASFVSGEPNALQDGNGHGTHVAGTVAALNNTTGVLGVAYNADLYAVKVLSASGSGTLSGIAQGIEWSISNGMNVINMSLGGSSGSTALQQACNNAYNRGIVVIAAAGNSGSSGNRNTMGYPARYSSVIAVGAVSSNNTRASFSSVGSELEVMAPGVNILSTTPGNNYASFNGTSMAAPHVAGAAALIKAKYPSMTNVQIRERLKNTATNLGDPFFYGKGVINVESALQ

SEQ ID NO: 70072 - protein, 275 aa, Bacillus sp. LG1
AQTVPWGIPHIKADKAHAAGVTGSGVKVAILDTGIDANHADLNVKGGASRVSGEPNALQDGNGHGTHVAGTVAALNNTTGVLGVAYNADLYAVKVLSASGSGTLSGIAQGIEWSISNGMNVINMSLGGSSGSTALQQACNNAYNRGIVVIAAAGNSGSSGNRNTMGYPARYSSVIAVGAVSSNNTRASFSSVGSELEVMAPGVNILSTTPGNNYASFNGTSMAAPHVAGAAALIKAKYPSMTNVQIRERLKNTATNLGDPFFYGKGVINVESALQ

SEQ ID NO: 70073 - protein, 275 aa, Bacillus sp. LG1
AQTVPWGIPHIKADKAHAAGVTGSGVKVAILDTGIDANHADLNVKGGASFVSGEPNALQDGNGHGTHVAGTVAALNNTTGVLGVAYNADLYAVKVLSASGSGTLSGIAQGIEWSISNGMNVINMSLGGSVGSTALQQACNNAYNRGIVVIAAAGNSGSSGNRNTMGYPARYSSVIAVGAVSSNNTRASFSSVGSELEVMAPGVNILSTTPGNNYASFNGTSMAAPHVAGAAALIKAKYPSMTNVQIRERLKNTATNLGDPFFYGKGVINVESALQ

SEQ ID NO: 70074 - protein, 275 aa, Bacillus sp. LG1
AQTVPWGIPHIKADKAHNAGVTGSGVKVAILDTGIDANHADLNVKGGASFVSGEPNALQDGNGHGTHVAGTVAALNNTTGVLGVAYNADLYAVKVLSASGSGTLSGIAQGIEWSISNGMNVINMSLGGSSGSTALQQACNNAYNRGIVVIAAAGNSGSSGNRNTMGYPARYSSVIAVGAVSSNNTRASFSSVGSELEVMAPGVNILSTTPGNNYASFNGTSMAAPHVAGAAALIKAKYPSMTNVQIRERLKNTATNLGDPFFYGKGVINVESALQ

SEQ ID NO: 70075 - protein, 275 aa, Bacillus sp. LG1
AQTVPWGIPHIKADKAHAAGVTGSGVKVAILDTGIDANHADLNVKGGASFVSGEPNALQDGNGHGTHVAGTVAALNNTTGVLSVAYNADLYAVKVLSASGSGTLSGIAQGIEWSISNGMNVINMSLGGSSGSTALQQACNNAYNRGIVVIAAAGNSGSSGNRNTMGYPARYSSVIAVGAVSSNNTRASFSSVGSELEVMAPGVNILSTTPGNNYASFNGTSMAAPHVAGAAALIKAKYPSMTNVQIRERLKNTATNLGDPFFYGKGVINVESALQ

SEQ ID NO: 70076 - protein, 275 aa, Bacillus sp. LG1
AQTVPWGIPHIKADKAHAAGVTGSGVKVAILDTGIDANHADLNVKGGASFVSGEPNALQDGNGHGTHVAGTVAALNNTTGVLGVAYNADLYAVKVLSASGSGTLSGIAQGIEWSISNGMNVINMSLGGSSGSTALQQACNNAYNRGIVVIAAAGNSGSSGNRNTMGYPARYSSVIAVGAVSSNNTRASFSSVGSELEVMAPGVNILSTTPGNNYASFNGTSMAAPHVAGAAALIKAKYPSMTNVQIRERLKNTATNLGDPFFYGKGVINVLSALQ

SEQ ID NO: 70077 - protein, 275 aa, Bacillus sp. LG1
AQTVPWGIPHIKADKAHAAGVTGSGVKVAILDTGIDANHADLNVKGGASFVSGEPNALQDGNGHGTHVAGTVAALNNTTGVLGVAYNADLYAVKVLSASGSGTLSGIAQGIEWSISNGMNVINMSLGGSSGSTALQQACNNAYNRGIVVIAAAGNSGSSGNRNTMGYPARYSSVIATGAVSSNNTRASFSSVGSELEVMAPGVNILSTTPGNNYASFNGTSMAAPHVAGAAALIKAKYPSMTNVQIRERLKNTATNLGDPFFYGKGVINVESALQ

SEQ ID NO: 70078 - protein, 275 aa, Bacillus sp. LG1
AQTVPWGIPHTKADKAHAAGVTGSGVKVAILDTGIDANHADLNVKGGASFVSGEPNALQDGNGHGTHVAGTVAALNNTTGVLGVAYNADLYAVKVLSASGSGTLSGIAQGIEWSISNGMNVINMSLGGSSGSTALQQACNNAYNRGIVVIAAAGNSGSSGNRNTMGYPARYSSVIAVGAVSSNNTRASFSSVGSELEVMAPGVNILSTTPGNNYASFNGTSMAAPHVAGAAALIKAKYPSMTNVQIRERLKNTATNLGDPFFYGKGVINVESALQ

SEQ ID NO: 70079 - protein, 275 aa, Bacillus sp. LG1
AQTVPWGIPHIKADKAHAAGVTGSGVKVAILDTGIDANHADLNVKGGLSFVSGEPNALQDGNGHGTHVAGTVAALNNTTGVLGVAYNADLYAVKVLSASGSGTLSGIAQGIEWSISNGMNVINMSLGGSSGSTALQQACNNAYNRGIVVIAAAGNSGSSGNRNTMGYPARYSSVIAVGAVSSNNTRASFSSVGSELEVMAPGVNILSTTPGNNYASFNGTSMAAPHVAGAAALIKAKYPSMTNVQIRERLKNTATNLGDPFFYGKGVINVESALQ

SEQ ID NO: 70080 - protein, 275 aa, Bacillus sp. LG1
AQTVPWGIPHIKADKAHAAGVTGSGVKVAILDTGIDANHADLNVKGGASFVSGEPNALQDGNGHGTHVAGTVAALNNTTGVLGVAYNADLYAVKVLSASGSGTLSGIAQGIEWSISNGMNVINMSLGGSSGSTALQQACNNAYNRGIVVIAAAGNSGSSGNRNTMGYPARYSSVIAVGAVSSNNTRASFSSVGSELEVMAPGVNILSTTPGNNYASFNGTSMAAPHVAGAAALIKAKYRSMTNVQIRERLKNTATNLGDPFFYGKGVINVESALQ

SEQ ID NO: 70081 - protein, 275 aa, Bacillus sp. LG1
AQTVPWGIPHIKADKAHAAGVTGSGVKVAILDTGIDANHADLNVKGGASFVSGEPNALQDGNGHGTHVAGTVAALNNTTGVLGVAYNADLYAVKVLSASGSGTLSGIAQGIEWSISNGMNVINMSLGGSSGSTALQQACNNAYNRGIVVIAAAGNSGSSGNRNTMGYPARYSSVIAVGAVSSNNTRASFSSVGSELEVMAPGVNILSTTPGNNYASFNGTSMAAPHVAGAAAAIKAKYPSMTNVQIRERLKNTATNLGDPFFYGKGVINVESALQ

SEQ ID NO: 70082 - protein, 275 aa, Bacillus sp. LG1
AQTVPWGIPHIKADKAHAAGVTGSGVKVAILDTGIDANHADLNVKGGASFVSGEPNALQDGNGHGTHVAGTVAALNNTTGVLGVAYNADLYAVKVLSAIGSGTLSGIAQGIEWSISNGMNVINMSLGGSSGSTALQQACNNAYNRGIVVIAAAGNSGSSGNRNTMGYPARYSSVIAVGAVSSNNTRASFSSVGSELEVMAPGVNILSTTPGNNYASFNGTSMAAPHVAGAAALIKAKYPSMTNVQIRERLKNTATNLGDPFFYGKGVINVESALQ

SEQ ID NO: 70083 - protein, 275 aa, Bacillus sp. LG1
AQTVPWGIPHIKADKAHAAGVTGSGVKVAILDTGIDANHADLNVKGGAEFVSGEPNALQDGNGHGTHVAGTVAALNNTTGVLGVAYNADLYAVKVLSASGSGTLSGIAQGIEWSISNGMNVINMSLGGSSGSTALQQACNNAYNRGIVVIAAAGNSGSSGNRNTMGYPARYSSVIAVGAVSSNNTRASFSSVGSELEVMAPGVNILSTTPGNNYASFNGTSMAAPHVAGAAALIKAKYPSMTNVQIRERLKNTATNLGDPFFYGKGVINVESALQ

SEQ ID NO: 70084 - protein, 275 aa, Bacillus sp. LG1
AQTVPWGIPHIKADKAHAAGVTGSGVKVAILDTGIDANHADLNVKGGASFVSGEPNALQDGNGHGTHVAGTVAALNNTTGVLGVAYNADLYAVKVLSASGSGTLSGIAQGIEWSISNGMNVINMSLGGSYGSTALQQACNNAYNRGIVVIAAAGNSGSSGNRNTMGYPARYSSVIAVGAVSSNNTRASFSSVGSELEVMAPGVNILSTTPGNNYASFNGTSMAAPHVAGAAALIKAKYPSMTNVQIRERLKNTATNLGDPFFYGKGVINVESALQ

SEQ ID NO: 70085 - protein, 275 aa, Bacillus sp. LG1
AQTVPWGIPHIKADKAHAAGVTGSGVKVAILDTGIDANHADLNVKGGASFVSGEPNALQDGNGHGTHVAGTVAALNNTTGVLGVAYNADLYAVKVISASGSGTLSGIAQGIEWSISNGMNVINMSLGGSSGSTALQQACNNAYNRGIVVIAAAGNSGSSGNRNTMGYPARYSSVIAVGAVSSNNTRASFSSVGSELEVMAPGVNILSTTPGNNYASFNGTSMAAPHVAGAAALIKAKYPSMTNVQIRERLKNTATNLGDPFFYGKGVINVESALQ

SEQ ID NO: 70086 - protein, 275 aa, Bacillus sp. LG1
AQTVPWGIPHIKADKAHAAGVTGSGVKVAILDTGIDANHADLNVKGGASFVSGEPNALQDGNGHGTHVAGTVAALNNTTGVLGVAYNADLYAVKVLSASGSGTLSGIAQGIEWSISNGMNVINMSLGGSSGSTALQQACNNAYNRGIVVIAAAGNSGSKGNRNTMGYPARYSSVIAVGAVSSNNTRASFSSVGSELEVMAPGVNILSTTPGNNYASFNGTSMAAPHVAGAAALIKAKYPSMTNVQIRERLKNTATNLGDPFFYGKGVINVESALQ

SEQ ID NO: 70087 - protein, 275 aa, Bacillus sp. LG1
AQTVPWGIPHIKADKAHAAGVTGSGVKVAILDTGIDANHADLNVKGGASFVSGEPNALQDGNGHGTHVAGTVAALNNTTGVLGVAYNADLYAVKVLSASGSGTLSGIAQGIEWSISNGMNVINMSLGGSSGSTALQQACNNAYNRGIVVIAAAGNSGSSGNRNTMGYPARYSSVIAVGAVSSNNTRASFSSVGSELEVMAPGVNILSTTPGNNYASFNGTSMAAPHVAGAAALIKAKYPSMTNVQIRERLKNTATNLGDPFFYGKGVINMESALQ

SEQ ID NO: 70088 - protein, 275 aa, Bacillus sp. LG1
AWTVPWGIPHIKADKAHAAGVTGSGVKVAILDTGIDANHADLNVKGGASFVSGEPNALQDGNGHGTHVAGTVAALNNTTGVLGVAYNADLYAVKVLSASGSGTLSGIAQGIEWSISNGMNVINMSLGGSSGSTALQQACNNAYNRGIVVIAAAGNSGSSGNRNTMGYPARYSSVIAVGAVSSNNTRASFSSVGSELEVMAPGVNILSTTPGNNYASFNGTSMAAPHVAGAAALIKAKYPSMTNVQIRERLKNTATNLGDPFFYGKGVINVESALQ

SEQ ID NO: 70089 - protein, 275 aa, Bacillus sp.
AQTVPWGIPHIKADKAHAAGVTGSGVKVAILDTGIDANHADLNVKGGASFVSGEPNALQDGNGHGTHVAGTVAALDNTTGVLGVAYNADLYAVKVLSASGSGTLSGIAQGIEWSISNRMNVINMSLGGSSGSTALQQACNNAYNRGIVVIAAAGNSGSSGNRNTMDYPARYSSVIAVGAVSSNNTRASFSSVGSELEVMAPGVNILSTTPGNNYASFNGTSMAAPHVAGAAALIKAKYPSMTNVQIRERLKNTATRLGDPFFYGKGVINVESALQ

SEQ ID NO: 70090 - protein, 275 aa, Bacillus sp. LG1
AQTVPWGIPHIKADKAHAALVTGSGVKVAILDTGIDANHADLNVKGGASFVSGEPNALQDGNGHGTHVAGTVAALNNTTGVLGVAYNADLYAVKVLSASGSGTLSGIAQGIEWSISNGMNVINMSLGGSSGSTALQQACNNAYNRGIVVIAAAGNSGSSGNRNTMGYPARYSSVIAVGAVSSNNTRASFSSVGSELEVMAPGVNILSTTPGNNYASFNGTSMAAPHVAGAAALIKAKYPSMTNVQIRERLKNTATNLGDPFFYGKGVINVESALQ

SEQ ID NO: 70091 - protein, 275 aa, Bacillus sp. LG1
AQTVPWGIPHIKADKAHAAGVTGSGVKVAILDTGIDANHADLNVKGGASFVSGMPNALQDGNGHGTHVAGTVAALNNTTGVLGVAYNADLYAVKVLSASGSGTLSGIAQGIEWSISNGMNVINMSLGGSSGSTALQQACNNAYNRGIVVIAAAGNSGSSGNRNTMGYPARYSSVIAVGAVSSNNTRASFSSVGSELEVMAPGVNILSTTPGNNYASFNGTSMAAPHVAGAAALIKAKYPSMTNVQIRERLKNTATNLGDPFFYGKGVINVESALQ

SEQ ID NO: 70092 - protein, 275 aa, Bacillus sp. LG1
AQTVPWGIPHIKADKAHAAGVTGSGVKVAILDTGIDANHADLNVKGGASFVSGEPNALQDGNGHGTHVAGTVAALNNTTGVLGVAYNADLYAVKVLSASGSGTLSGIAQGIEWSISNGMNVINMSLGGSSGSTALQQACNNAYNRGIVVIAAAGNSGSSGNRNTMNYPARYSSVIAVGAVSSNNTRASFSSVGSELEVMAPGVNILSTTPGNNYASFNGTSMAAPHVAGAAALIKAKYPSMTNVQIRERLKNTATNLGDPFFYGKGVINVESALQ

SEQ ID NO: 70093 - protein, 275 aa, Bacillus sp. LG1
AQTVPWGIPHIKADKAHAAGVTGSGVKVAILDTGIDANHADLNVKGGASFVSGEPNALQDGNGHGTHVAGTVAALNNTTGVLGVAYNADLYAVKVLSASGSGTLSGIAQGIEWSISNGMNVINMSLGGSSGSTALQQACNNAYNRGIVVIAAAGNSGSSGNRNTMGYPARYSSVIAVGAVSSNNTRAGFSSVGSELEVMAPGVNILSTTPGNNYASFNGTSMAAPHVAGAAALIKAKYPSMTNVQIRERLKNTATNLGDPFFYGKGVINVESALQ

SEQ ID NO: 70094 - protein, 275 aa, Bacillus sp. LG1
AQTVPWGIPHIKADKAHAAGVTGSGVKVAILDTGIDANHADLNVKGGASFVSGEPNALQDGNGHGTHVAGTVAALNNTTGVLGVAYNADLYAVKVLSASGSFTLSGIAQGIEWSISNGMNVINMSLGGSSGSTALQQACNNAYNRGIVVIAAAGNSGSSGNRNTMGYPARYSSVIAVGAVSSNNTRASFSSVGSELEVMAPGVNILSTTPGNNYASFNGTSMAAPHVAGAAALIKAKYPSMTNVQIRERLKNTATNLGDPFFYGKGVINVESALQ

SEQ ID NO: 70095 - protein, 275 aa, Bacillus sp. LG1
AQTVPWGIPHIKADKAHAAGVTGSGVKVAILDTGIDANHADLNVKGGASFVSGEPNALQDGNGHGTHVAGTVAALNNTTGVLGVAYNADLYAVKVLSASGSGTLSGIAQGIEWSISNGMNVINMSLGGSSQSTALQQACNNAYNRGIVVIAAAGNSGSSGNRNTMGYPARYSSVIAVGAVSSNNTRASFSSVGSELEVMAPGVNILSTTPGNNYASFNGTSMAAPHVAGAAALIKAKYPSMTNVQIRERLKNTATNLGDPFFYGKGVINVESALQ

SEQ ID NO: 70096 - protein, 275 aa, Bacillus sp. LG1
AQTVPWGIPHIKADKAHAAGVTGSGVKVAILDTGIDANHADLNVKGGASFVSGEPNALQDGNGHGTHVAGTVAALNNTTGVLGVAYNADLYVVKVLSASGSGTLSGIAQGIEWSISNGMNVINMSLGGSSGSTALQQACNNAYNRGIVVIAAAGNSGSSGNRNTMGYPARYSSVIAVGAVSSNNTRASFSSVGSELEVMAPGVNILSTTPGNNYASFNGTSMAAPHVAGAAALIKAKYPSMTNVQIRERLKNTATNLGDPFFYGKGVINVESALQ

SEQ ID NO: 70097 - protein, 275 aa, Bacillus sp. LG1
AQTVPWGIPHIKADKAHAAGVTGSGVKVAILDTGIDANHADLNVKGGASFVSGEPNALQDGNGHGTHVAGTVAALNNTTGVLGVAYNADLYAVKVLSASGSGTLSGIAQGIEWSISNGMNVINMSLGGSSGSTALQEACNNAYNRGIVVIAAAGNSGSSGNRNTMGYPARYSSVIAVGAVSSNNTRASFSSVGSELEVMAPGVNILSTTPGNNYASFNGTSMAAPHVAGAAALIKAKYPSMTNVQIRERLKNTATNLGDPFFYGKGVINVESALQ

SEQ ID NO: 70098 - protein, 275 aa, Bacillus sp. LG1
AQTVPWGIPHIKADKAHAAGVTGSGVKVAILDTGIDANHADLNVKGGASFVSGEPNALQDGNGHGTHVAGTVAALNNTTGVLGVAYNADLYAVKVLSASGSGTLSGIAQGIEWSISNGMNVINMSLGGSLGSTALQQACNNAYNRGIVVIAAAGNSGSSGNRNTMGYPARYSSVIAVGAVSSNNTRASFSSVGSELEVMAPGVNILSTTPGNNYASFNGTSMAAPHVAGAAALIKAKYPSMTNVQIRERLKNTATNLGDPFFYGKGVINVESALQ

SEQ ID NO: 70099 - protein, 275 aa, Bacillus sp. LG1
AQTVPWGIPHIKADKAHAAGVTGSGVKVAILDTGIDANHADLNVKGGASFVSGEPNALQDGNGHGTHVAGTVAALNNTTGVLGVAYNADLYAVKVLSASGSGTLSGIAQGIEWSISNGMNVINMSLGGSSGSTALQQACNNAYNRGIVVIAAAGNSGSSGNRNTMGYPARYSSVIAVGANSSNNTRASFSSVGSELEVMAPGVNILSTTPGNNYASFNGTSMAAPHVAGAAALIKAKYPSMTNVQIRERLKNTATNLGDPFFYGKGVINVESALQ

SEQ ID NO: 70100 - protein, 275 aa, Bacillus sp. LG1
AQTVPWGIPHIKADKAHAAGVTGSGVKVAILDTGIDANHADLNVKGGASFVSGEPNALQDGNGHGTHVAGTVAALNNTTGVLGVAYNADLYAVKVLSASGSGTLSGIAQGIEWSISNGMNVINMSLGGSSGSTALQQACNNAYNRGIVVIAAAGNSGSSGNRNTMGYPARYSSVIAVGAVSWNNTRASFSSVGSELEVMAPGVNILSTTPGNNYASFNGTSMAAPHVAGAAALIKAKYPSMTNVQIRERLKNTATNLGDPFFYGKGVINVESALQ

SEQ ID NO: 70101 - protein, 275 aa, Bacillus sp. LG1
AQTVPWGIPHIKADKAHAAGVTGSGVKVAILDTGIDANHADLNVKGGGSFVSGEPNALQDGNGHGTHVAGTVAALNNTTGVLGVAYNADLYAVKVLSASGSGTLSGIAQGIEWSISNGMNVINMSLGGSSGSTALQQACNNAYNRGIVVIAAAGNSGSSGNRNTMGYPARYSSVIAVGAVSSNNTRASFSSVGSELEVMAPGVNILSTTPGNNYASFNGTSMAAPHVAGAAALIKAKYPSMTNVQIRERLKNTATNLGDPFFYGKGVINVESALQ

SEQ ID NO: 70102 - protein, 275 aa, Bacillus sp. LG1
AQTVPWGIPHIKADKAHAAGVTGSGVKVAILDTGIDANHADLNVKGGASFVSGEPNALQDGNGHGTHVAGTVAALNNTTGVLGVAYNADLYAVAVLSASGSGTLSGIAQGIEWSISNGMNVINMSLGGSSGSTALQQACNNAYNRGIVVIAAAGNSGSSGNRNTMGYPARYSSVIAVGAVSSNNTRASFSSVGSELEVMAPGVNILSTTPGNNYASFNGTSMAAPHVAGAAALIKAKYPSMTNVQIRERLKNTATNLGDPFFYGKGVINVESALQ

SEQ ID NO: 70103 - protein, 275 aa, Bacillus sp. LG1
AQTVPWGIPHIKADKAHAAGVTGSGVKVAILDTGIDANHADLNVKGGASFVSGEPNALQDGNGHGTHVAGTVAALNNTTGVLGVAYNADLYAVKVLSASGSGTLSGIAQGIEWSISNGMNVINMSLGGSSGSTALQQACNNAYNRGIVVIAAAGNVGSSGNRNTMGYPARYSSVIAVGAVSSNNTRASFSSVGSELEVMAPGVNILSTTPGNNYASFNGTSMAAPHVAGAAALIKAKYPSMTNVQIRERLKNTATNLGDPFFYGKGVINVESALQ

SEQ ID NO: 70104 - protein, 275 aa, Bacillus sp. LG1
AQTVPWGIPHIKADKAHAAGVTGSGVKVAILDTGIDANHADLNVKGGASFVSGEPNALQDGNGHGTHVAGTVAALNNTTGVLGVAYNADLYAVKVLSASGSGTLSGIAQGIEWSISNGMNVINMSLGGSSGSTALQQACNNAYNRGIVVIAAAGNSGSSGNRNTMGYPARYSSVIAVGAVSSNNTRASFSSVGSELEVMAPGVNILSTTPGNNYASFNGTSMAAPHVAGAAALIKAKYMSMTNVQIRERLKNTATNLGDPFFYGKGVINVESALQ

SEQ ID NO: 70105 - protein, 275 aa, Bacillus sp. LG1
AQTVPWGIPHIKADKAHAAGVTGSGVKVAILDTGIDANHADLNVKGGASFVSGEPNALQDGNGHGTHVAGTVAALNNTTGVLGVAYNADLYAVKVLSASGSYTLSGIAQGIEWSISNGMNVINMSLGGSSGSTALQQACNNAYNRGIVVIAAAGNSGSSGNRNTMGYPARYSSVIAVGAVSSNNTRASFSSVGSELEVMAPGVNILSTTPGNNYASFNGTSMAAPHVAGAAALIKAKYPSMTNVQIRERLKNTATNLGDPFFYGKGVINVESALQ

SEQ ID NO: 70106 - protein, 275 aa, Bacillus sp. LG1
AQTVPWGIPHIKADKAHAAGVTGSGVKVAILDTGIDANHADLNVKGGASFVSGEPNALQDGNGHGTHVAGTVAALNNTTGVLGVAYNADLYAVKVLSASGSGTLSGIAQGIEWSISNGMNVINMSLGGSSGSTALQQACNNAYNRGIVVIAAAGNSGSSGNRNTMGYPARYSSVIAVGAVSSNNTRASFSSVGSELEVMAPGVNILSTTPGNNYASFNGTSMAAPHVAGAAALIKATYPSMTNVQIRERLKNTATNLGDPFFYGKGVINVESALQ

SEQ ID NO: 70107 - protein, 275 aa, Bacillus sp. LG1
AQTVPWGIPHIKADKAHAAGVTGSGVKVAILDTGIDANHADLNVKGGASFVSGEPNALQDGNGHGTHVAGMVAALNNTTGVLGVAYNADLYAVKVLSASGSGTLSGIAQGIEWSISNGMNVINMSLGGSSGSTALQQACNNAYNRGIVVIAAAGNSGSSGNRNTMGYPARYSSVIAVGAVSSNNTRASFSSVGSELEVMAPGVNILSTTPGNNYASFNGTSMAAPHVAGAAALIKAKYPSMTNVQIRERLKNTATNLGDPFFYGKGVINVESALQ

SEQ ID NO: 70108 - protein, 275 aa, Bacillus sp. LG1
AQTVPWGIPHIKADKAHAAGVTGSGVKVAILDTGIDANHADLNVKGGASFVSGEPNALQDGNGHGTHVAGTVAALNNTTGVLGVAYNADLYAVKVLSASGSGTLSGIAQGIEWSISNGMNVINMSLGGSSGSTALQQACNNAYNRGIVVIAAAGNSGSSGNRNTMFYPARYSSVIAVGAVSSNNTRASFSSVGSELEVMAPGVNILSTTPGNNYASFNGTSMAAPHVAGAAALIKAKYPSMTNVQIRERLKNTATNLGDPFFYGKGVINVESALQ

SEQ ID NO: 70109 - protein, 275 aa, Bacillus sp. LG1
AQTVPWGIPHIKADKAHAAGVTGSGVKVAILDTGIDANHADLNVKGGASFVSGEPNALQDGNGHGTHVAGTVAALNNTTGVLGVAYNADLYAVKVLSASGSGTLSGIAQGIEWSISNGMNVINMSLGGSSGSTALQQACNNAYNRGIVVIAAAGNSGHSGNRNTMGYPARYSSVIAVGAVSSNNTRASFSSVGSELEVMAPGVNILSTTPGNNYASFNGTSMAAPHVAGAAALIKAKYPSMTNVQIRERLKNTATNLGDPFFYGKGVINVESALQ

SEQ ID NO: 70110 - protein, 275 aa, Bacillus sp. LG1
AQTVPWGIPHIKADKAHAAGVTGSGVKVAILDTGIDANHADLNVKGGASFVSGEPNALQDGNGHGTHVAGTVAALNNTTGVLGVAYNADLYAVKVLSASGSGTLSGIAQGIEWSISNGMNVINMSLGGSSGSTALQQACNNAYNRGIVVIAAAGNSGSSGNRNTMGYPARYSSVIAVGAVSSNNTRASFSSVGSELEVMAPGVNILSLTPGNNYASFNGTSMAAPHVAGAAALIKAKYPSMTNVQIRERLKNTATNLGDPFFYGKGVINVESALQ

SEQ ID NO: 70111 - protein, 275 aa, Bacillus sp. LG1
AQTVPWGIPHIKADKAHAAGVTGSGQKVAILDTGIDANHADLNVKGGASFVSGEPNALQDGNGHGTHVAGTVAALNNTTGVLGVAYNADLYAVKVLSASGSGTLSGIAQGIEWSISNGMNVINMSLGGSSGSTALQQACNNAYNRGIVVIAAAGNSGSSGNRNTMGYPARYSSVIAVGAVSSNNTRASFSSVGSELEVMAPGVNILSTTPGNNYASFNGTSMAAPHVAGAAALIKAKYPSMTNVQIRERLKNTATNLGDPFFYGKGVINVESALQ

SEQ ID NO: 70112 - protein, 275 aa, Bacillus sp. LG1
AQTSPWGIPHIKADKAHAAGVTGSGVKVAILDTGIDANHADLNVKGGASFVSGEPNALQDGNGHGTHVAGTVAALNNTTGVLGVAYNADLYAVKVLSASGSGTLSGIAQGIEWSISNGMNVINMSLGGSSGSTALQQACNNAYNRGIVVIAAAGNSGSSGNRNTMGYPARYSSVIAVGAVSSNNTRASFSSVGSELEVMAPGVNILSTTPGNNYASFNGTSMAAPHVAGAAALIKAKYPSMTNVQIRERLKNTATNLGDPFFYGKGVINVESALQ

SEQ ID NO: 70113 - protein, 275 aa, Bacillus sp. LG1
AQTVPWGIPHIKADKAHAAGVTGSGVKVAILDTGIDANHADLNVKGGASFVSGEPNALQDGNGHGTHVAGTVAALNNTTGVLGVAYNADLYAVKVLSASGSGTLSGIAQGIEWSISNGMNVINMSLGGSSGSTALQQACNNAYNRGIVVIAAAGNSGSSGNRNTMGYPARYSSVIAVGAVSSNNTRNSFSSVGSELEVMAPGVNILSTTPGNNYASFNGTSMAAPHVAGAAALIKAKYPSMTNVQIRERLKNTATNLGDPFFYGKGVINVESALQ

SEQ ID NO: 70114 - protein, 275 aa, Bacillus sp. LG1
AQTVPWGIPHIKADKAHAAGVTGSGVKVAILDTGIDANHADLNVKGGASFVSGEPNALQYGNGHGTHVAGTVAALNNTTGVLGVAYNADLYAVKVLSASGSGTLSGIAQGIEWSISNGMNVINMSLGGSSGSTALQQACNNAYNRGIVVIAAAGNSGSSGNRNTMGYPARYSSVIAVGAVSSNNTRASFSSVGSELEVMAPGVNILSTTPGNNYASFNGTSMAAPHVAGAAALIKAKYPSMTNVQIRERLKNTATNLGDPFFYGKGVINVESALQ

SEQ ID NO: 70115 - protein, 275 aa, Bacillus sp. LG1
AQTVPWGIPHIKADKAHAAGVTGSGVKVAILDTGIDANHADLNVKGGASFVSGEPNALQDGNGHGTHVAGTVAALNNTTGVLGVAYNADLYAVKVLSASGSGTLSGIAQGIEWSISNGMNVINMSLGGSSGSTALQQACNNAYNRGIVVIAAAGNSGSSGNRNTMDYPARYSSVIAVGAVSSNNTRASFSSVGSELEVMAPGVNILSTTPGNNYASFNGTSMAAPHVAGAAALIKAKYPSMTNVQIRERLKNTATNLGDPFFYGKGVINVESALQ

SEQ ID NO: 70116 - protein, 275 aa, Bacillus sp. LG1
AQTVSWGIPHIKADKAHAAGVTGSGVKVAILDTGIDANHADLNVKGGASFVSGEPNALQDGNGHGTHVAGTVAALNNTTGVLGVAYNADLYAVKVLSASGSGTLSGIAQGIEWSISNGMNVINMSLGGSSGSTALQQACNNAYNRGIVVIAAAGNSGSSGNRNTMGYPARYSSVIAVGAVSSNNTRASFSSVGSELEVMAPGVNILSTTPGNNYASFNGTSMAAPHVAGAAALIKAKYPSMTNVQIRERLKNTATNLGDPFFYGKGVINVESALQ

SEQ ID NO: 70117 - protein, 275 aa, Bacillus sp. LG1
AETVPWGIPHIKADKAHAAGVTGSGVKVAILDTGIDANHADLNVKGGASFVSGEPNALQDGNGHGTHVAGTVAALNNTTGVLGVAYNADLYAVKVLSASGSGTLSGIAQGIEWSISNGMNVINMSLGGSSGSTALQQACNNAYNRGIVVIAAAGNSGSSGNRNTMGYPARYSSVIAVGAVSSNNTRASFSSVGSELEVMAPGVNILSTTPGNNYASFNGTSMAAPHVAGAAALIKAKYPSMTNVQIRERLKNTATNLGDPFFYGKGVINVESALQ

SEQ ID NO: 70118 - protein, 275 aa, Bacillus sp. LG1
AQTVPWGIPHIKADKAHAAGVTGSGVKVAILDTGIDANHADLNVKGGASFVSGEPNALQDGNGHGTHVAGTVAALNNTTGVLGVAYNADLWAVKVLSASGSGTLSGIAQGIEWSISNGMNVINMSLGGSSGSTALQQACNNAYNRGIVVIAAAGNSGSSGNRNTMGYPARYSSVIAVGAVSSNNTRASFSSVGSELEVMAPGVNILSTTPGNNYASFNGTSMAAPHVAGAAALIKAKYPSMTNVQIRERLKNTATNLGDPFFYGKGVINVESALQ

SEQ ID NO: 70119 - protein, 275 aa, Bacillus sp. LG1
AQTVPWGIPHIKADKAHAAGVTGSGVKVAILDTGIDANHADLNVKGGASFVSGEPNALQDGNGHGTHVAGTVAALNNTTGVLGVAYNADLYAVKVLSASGSGTLSGIAQGIEWSISNGMNVINMSLGGSSGSTALQQACNNAYNRGIVVIAAAGNSGSSGNRNTMGYPARYSSVIAVGAVSSNNTRASFSSVGSELEVMAPGVNILSTTPGNNYASFNGTSMAAPHVAGAAALIKAKYPSMTNVQIRERLKNTATNLGDPFFYGSGVINVESALQ

SEQ ID NO: 70120 - protein, 275 aa, Bacillus sp. LG1
AQTVPWGIPHIKADKAHAAGVTGSGVKVAILDTGIDANHADLNVKGGASFVSGEPNALQDGNGHGTHVAGTVAALNNTTGVLGVAYNADLYAVKVLSASGSGTLSGIAQGIEWSISNGMNVINMSLGGSSGSTALQQACNNAYNRGIVVIAAAGNSGSSGNRNTMGYPARYSSVIAVGAVSSNNTRASFSSVGSELEVMAPGVNILSTTPGNNYASFNGTSMAAPHVAGAAALIKAKYPSMTNVQIRERLKNTAWNLGDPFFYGKGVINVESALQ

SEQ ID NO: 70121 - protein, 275 aa, Bacillus sp. LG1
AQTVPWGIPHIKADKAHAAGVTGSGVKVAILDTGIDANHADLNVKGGASWVSGEPNALQDGNGHGTHVAGTVAALNNTTGVLGVAYNADLYAVKVLSASGSGTLSGIAQGIEWSISNGMNVINMSLGGSSGSTALQQACNNAYNRGIVVIAAAGNSGSSGNRNTMGYPARYSSVIAVGAVSSNNTRASFSSVGSELEVMAPGVNILSTTPGNNYASFNGTSMAAPHVAGAAALIKAKYPSMTNVQIRERLKNTATNLGDPFFYGKGVINVESALQ

SEQ ID NO: 70122 - protein, 275 aa, Bacillus sp. LG1
AQTVPWGIPHIKATKAHAAGVTGSGVKVAILDTGIDANHADLNVKGGASFVSGEPNALQDGNGHGTHVAGTVAALNNTTGVLGVAYNADLYAVKVLSASGSGTLSGIAQGIEWSISNGMNVINMSLGGSSGSTALQQACNNAYNRGIVVIAAAGNSGSSGNRNTMGYPARYSSVIAVGAVSSNNTRASFSSVGSELEVMAPGVNILSTTPGNNYASFNGTSMAAPHVAGAAALIKAKYPSMTNVQIRERLKNTATNLGDPFFYGKGVINVESALQ

SEQ ID NO: 70123 - protein, 275 aa, Bacillus sp. LG1
AQTVPWGIPHIKADKAHAAGVTGSGVKVAILDTGIDANHADLNVKGGASFVSGVPNALQDGNGHGTHVAGTVAALNNTTGVLGVAYNADLYAVKVLSASGSGTLSGIAQGIEWSISNGMNVINMSLGGSSGSTALQQACNNAYNRGIVVIAAAGNSGSSGNRNTMGYPARYSSVIAVGAVSSNNTRASFSSVGSELEVMAPGVNILSTTPGNNYASFNGTSMAAPHVAGAAALIKAKYPSMTNVQIRERLKNTATNLGDPFFYGKGVINVESALQ

SEQ ID NO: 70124 - protein, 275 aa, Bacillus sp. LG1
AQTVPWGIPHIKADKAHAAGVTGSGVKVAILDTGIDANHADLNVKGGASFVSGEPNALQDGNGHGTHVAGTVAALNNTTGVLGVAYNADLYAVKVLSASGSGTLSGIAQGIEWSISNGMNVINMSLGGSSGSTALQQACNNAYNRGIVVIAAAGNSGSSGNRNTMGYPARYSSVIAVGAVSINNTRASFSSVGSELEVMAPGVNILSTTPGNNYASFNGTSMAAPHVAGAAALIKAKYPSMTNVQIRERLKNTATNLGDPFFYGKGVINVESALQ

SEQ ID NO: 70125 - protein, 275 aa, Bacillus sp. LG1
AQTVPWGIPHIKADKAHAAGVTGSGLKVAILDTGIDANHADLNVKGGASFVSGEPNALQDGNGHGTHVAGTVAALNNTTGVLGVAYNADLYAVKVLSASGSGTLSGIAQGIEWSISNGMNVINMSLGGSSGSTALQQACNNAYNRGIVVIAAAGNSGSSGNRNTMGYPARYSSVIAVGAVSSNNTRASFSSVGSELEVMAPGVNILSTTPGNNYASFNGTSMAAPHVAGAAALIKAKYPSMTNVQIRERLKNTATNLGDPFFYGKGVINVESALQ

SEQ ID NO: 70126 - protein, 275 aa, Bacillus sp. LG1
AKTVPWGIPHIKADKAHAAGVTGSGVKVAILDTGIDANHADLNVKGGASFVSGEPNALQDGNGHGTHVAGTVAALNNTTGVLGVAYNADLYAVKVLSASGSGTLSGIAQGIEWSISNGMNVINMSLGGSSGSTALQQACNNAYNRGIVVIAAAGNSGSSGNRNTMGYPARYSSVIAVGAVSSNNTRASFSSVGSELEVMAPGVNILSTTPGNNYASFNGTSMAAPHVAGAAALIKAKYPSMTNVQIRERLKNTATNLGDPFFYGKGVINVESALQ

SEQ ID NO: 70127 - protein, 275 aa, Bacillus sp. LG1
AQTVPWGIPHIKADKAHAAGVTGSGVKVAILDTGIDANHADLNVKGGASFVSGEPNALQDGNGHGTHVAGTVAALNNTTGVLGVAYNADLYAVKVLSASGSGTLSGIAQGIEWSISNGMNVINMSLGGSSGSTALQQACNNAYNRGIVVIAAAGNSGSSGNRNTMHYPARYSSVIAVGAVSSNNTRASFSSVGSELEVMAPGVNILSTTPGNNYASFNGTSMAAPHVAGAAALIKAKYPSMTNVQIRERLKNTATNLGDPFFYGKGVINVESALQ

SEQ ID NO: 70128 - protein, 275 aa, Bacillus sp. LG1
AQTVPWGIPHIKADKAHAAGVTGSGVKVAILDTGIDANHADLNVKGGASFVSGEPNALQDGNGHGTHVAGTVAALNNTTGVLGVAYNADLYAVKVLSASGSGTLSGIAQGIEWSISNGMNVINMSLGGSSGSTALQQACNNAYNRGIVVIAAAGNSGSSGNRNTMGYPARYSSVIAVGAVSSNNTRASFSSVGSELEVMAPGVNILSTTPGNNYASFNGTSMAAPHVAGAAALIKAFYPSMTNVQIRERLKNTATNLGDPFFYGKGVINVESALQ

SEQ ID NO: 70129 - protein, 275 aa, Bacillus sp. LG1
AQTVPWGIPHIKADKAHAAGVTGSGVKVAILDTGIDANHADLNVKGGASFVSGEPNALQDGNGHGTHVAGTVAALNNTTGVLGVAYNADLYAVKVLSASGSGTLSGIAQGIEWSISNGMNVINMSLGGSSGSTALQQACNNAYNRGIVVIAAAGNSGSSGNRNTMGYPARYSSVIAVGAVSSNNTRQSFSSVGSELEVMAPGVNILSTTPGNNYASFNGTSMAAPHVAGAAALIKAKYPSMTNVQIRERLKNTATNLGDPFFYGKGVINVESALQ

SEQ ID NO: 70130 - protein, 275 aa, Bacillus sp. LG1
AQTVPWGIPHIKADKAHAAGVTGSGVKVAILDTGIDANHADLNVKGGASFVSGEPNALQDGNGHGTHVAGTVTALNNTTGVLGVAYNADLYAVKVLSASGSGTLSGIAQGIEWSISNGMNVINMSLGGSSGSTALQQACNNAYNRGIVVIAAAGNSGSSGNRNTMGYPARYSSVIAVGAVSSNNTRASFSSVGSELEVMAPGVNILSTTPGNNYASFNGTSMAAPHVAGAAALIKAKYPSMTNVQIRERLKNTATNLGDPFFYGKGVINVESALQ

SEQ ID NO: 70131 - protein, 275 aa, Bacillus sp. LG1
AQTVPWGIPHIKADKAHAAGVTGSGVKVAILDTEIDANHADLNVKGGASFVSGEPNALQDGNGHGTHVAGTVAALNNTTGVLGVAYNADLYAVKVLSASGSGTLSGIAQGIEWSISNGMNVINMSLGGSSGSTALQQACNNAYNRGIVVIAAAGNSGSSGNRNTMGYPARYSSVIAVGAVSSNNTRASFSSVGSELEVMAPGVNILSTTPGNNYASFNGTSMAAPHVAGAAALIKAKYPSMTNVQIRERLKNTATNLGDPFFYGKGVINVESALQ

SEQ ID NO: 70132 - protein, 275 aa, Bacillus sp. LG1
AQTVPWGIPHIKADKAHAAGVTGSGVKVAILDTGIDANHADLNVKGGASFVSGEPNALQDGNGHGTHVAGTVAALNNTTGVLGVAYNADLYAVKVLSASGSGTLSGIAQGIEWSISNGMNVINMSLGGSSGSTALQQACNNAYNRGIVVIAAAGNSGSSGNRNTMGYPARYSSVIAVGAVSSNNTRASFSSVGSELEVMAPGVNILSTTPGQNYASFNGTSMAAPHVAGAAALIKAKYPSMTNVQIRERLKNTATNLGDPFFYGKGVINVESALQ

SEQ ID NO: 70133 - protein, 275 aa, Bacillus sp. LG1
AQTVPWGIPHIKADKAHAAGVTGSGVKVAILDTGIDANHADLNVKGGASFVSGEPNALQDGNGHGTHVAGTVAALNNTTGVLGVAYNADLYAVKVLSASGSGTLSGIAQGIEWSISNGMNVINMSLGGSSGSTALQQACNNAYNRGIVVIAAAGNSGSSGNRNTMGYPARYSSVIAVGAVSSNNTRASFSSVGSELEVMAPGVNILSTTPGNNYASFNGTSMAAPHVAGAAALVKAKYPSMTNVQIRERLKNTATNLGDPFFYGKGVINVESALQ

SEQ ID NO: 70134 - protein, 275 aa, Bacillus sp. LG1
AQTVPWGIPHIMADKAHAAGVTGSGVKVAILDTGIDANHADLNVKGGASFVSGEPNALQDGNGHGTHVAGTVAALNNTTGVLGVAYNADLYAVKVLSASGSGTLSGIAQGIEWSISNGMNVINMSLGGSSGSTALQQACNNAYNRGIVVIAAAGNSGSSGNRNTMGYPARYSSVIAVGAVSSNNTRASFSSVGSELEVMAPGVNILSTTPGNNYASFNGTSMAAPHVAGAAALIKAKYPSMTNVQIRERLKNTATNLGDPFFYGKGVINVESALQ

SEQ ID NO: 70135 - protein, 275 aa, Bacillus sp. LG1
AQTVPWGIPHIKADKAHAAGVTGSGVKVAILDTGIDANHADLNVKGGASFVSGEPNALQDGNGHGTHVAGTVAALNNTTGVLGVAYNADLYAVKVLSASGTGTLSGIAQGIEWSISNGMNVINMSLGGSSGSTALQQACNNAYNRGIVVIAAAGNSGSSGNRNTMGYPARYSSVIAVGAVSSNNTRASFSSVGSELEVMAPGVNILSTTPGNNYASFNGTSMAAPHVAGAAALIKAKYPSMTNVQIRERLKNTATNLGDPFFYGKGVINVESALQ

SEQ ID NO: 70136 - protein, 275 aa, Bacillus amyloliquefaciens
AQSVPYGVSQIKAPALHSQGYTGSNVKVAVIDSGIDSSHPDLKVAGGASMVPSETNPFQDNNGHGTHVAGTVAALNNSIGVLGVAPSASLYAVKVLGADGSGQYSWIINGIEWAIANNMDVINMSLGGPSGSAALKAAVDKAVASGVVVVAAAGNEGTSGSSSTVGYPGKYPSVIAVGAVDSSNQRASFSSVGPELDVMAPGVDIQSTWPGNKYAALNGTSMASPHVAGAAALILSKHPNWTNTQVRSSLENTTTKLGDSFYYGKGLINVQAAAQ

SEQ ID NO: 70137 - protein, 275 aa, Bacillus sp. LG1
AQTVPWGIPHIKADKAHAAGVTGSGVKVAILDTGIDANHADLNVKGGASFVSGEPNALQDSNGHGTHVAGTVAALNNTTGVLGVAYNADLYAVKVLSASGSGTLSGIAQGIEWSISNGMNVINMSLGGSSGSTALQQACNNAYNRGIVVIAAAGNSGSSGNRNTMGYPARYSSVIAVGAVSSNNTRASFSSVGSELEVMAPGVNILSTTPGNNYASFNGTSMAAPHVAGAAALIKAKYPSMTNVQIRERLKNTATNLGDPFFYGKGVINVESALQ

SEQ ID NO: 70138 - protein, 275 aa, Bacillus sp. LG1
AQTVPWGIPHIYADKAHAAGVTGSGVKVAILDTGIDANHADLNVKGGASFVSGEPNALQDGNGHGTHVAGTVAALNNTTGVLGVAYNADLYAVKVLSASGSGTLSGIAQGIEWSISNGMNVINMSLGGSSGSTALQQACNNAYNRGIVVIAAAGNSGSSGNRNTMGYPARYSSVIAVGAVSSNNTRASFSSVGSELEVMAPGVNILSTTPGNNYASFNGTSMAAPHVAGAAALIKAKYPSMTNVQIRERLKNTATNLGDPFFYGKGVINVESALQ

SEQ ID NO: 70139 - protein, 275 aa, Bacillus sp. LG1
AQTVPWGIPHIKADKAHAAGVTGSGVKVAILDTGIDANHADLNVKGGASFVSGEPNALQDGNGHGTHVAGTVAALNNFTGVLGVAYNADLYAVKVLSASGSGTLSGIAQGIEWSISNGMNVINMSLGGSSGSTALQQACNNAYNRGIVVIAAAGNSGSSGNRNTMGYPARYSSVIAVGAVSSNNTRASFSSVGSELEVMAPGVNILSTTPGNNYASFNGTSMAAPHVAGAAALIKAKYPSMTNVQIRERLKNTATNLGDPFFYGKGVINVESALQ

SEQ ID NO: 70140 - protein, 275 aa, Bacillus sp. LG1
AQTVPWGIPHIKADKAHAAGVTGSGVKVAILDTGIDANHADLNVKGGASFVSGEPNALQDGNGHGTHVAGTVAALNNTTGVLGVAYNADLYAVKVLSASGSGTLSGIAQGIEWSISNGMNVINMSLGGSSGSTALQQACNNAYNLGIVVIAAAGNSGSSGNRNTMGYPARYSSVIAVGAVSSNNTRASFSSVGSELEVMAPGVNILSTTPGNNYASFNGTSMAAPHVAGAAALIKAKYPSMTNVQIRERLKNTATNLGDPFFYGKGVINVESALQ

SEQ ID NO: 70141 - protein, 275 aa, Bacillus sp.
AQTVPWGIPHIKADKAHAAGVTGSGVKVAILDTGIDANHADLNVKGGASFVSDEPNALQDGNGHGTHVAGTVAALDNTTGVLGVAYNADLYAVKVLSASGSGTLSGIAQGIEWSISNGMNVINMSLGGSSGSTALQQACNNAYNRGIVVIAAAGNSGSSGNRNTMDYPARYSSVIAVGAVSSNNTRASFSSVGSELEVMAPGVNILSTTPGNNYASFNGTSMAAPHVAGAAALIKAKYPSMTNVQIRERLKNTATNLGDPFFYGKGVINVEKALQ

SEQ ID NO: 70142 - protein, 275 aa, Bacillus sp. LG1
AQTVPWGIPHIKADKAHAAGVTGSGVKVAILDTGIDANHADLNVKGGASFVSGEPNALQDGNGHGTHVAGTVAALNNTTGVLGVAYNADLYAVKVLSASGSGTLSGIAQGIEWSISNGMNVINMSLGGSSGSTALQQACNNAYNRQIVVIAAAGNSGSSGNRNTMGYPARYSSVIAVGAVSSNNTRASFSSVGSELEVMAPGVNILSTTPGNNYASFNGTSMAAPHVAGAAALIKAKYPSMTNVQIRERLKNTATNLGDPFFYGKGVINVESALQ

SEQ ID NO: 70143 - protein, 275 aa, Bacillus sp. LG1
AQTVPWGIPHIKADKAHAAGVTGSGVKVAILDTGIDANHADLNVKGGASFVSGEPNALQDGNGHGTHVAGTVAALNNTTGVLGVAYNADLYAVSVLSASGSGTLSGIAQGIEWSISNGMNVINMSLGGSSGSTALQQACNNAYNRGIVVIAAAGNSGSSGNRNTMGYPARYSSVIAVGAVSSNNTRASFSSVGSELEVMAPGVNILSTTPGNNYASFNGTSMAAPHVAGAAALIKAKYPSMTNVQIRERLKNTATNLGDPFFYGKGVINVESALQ

SEQ ID NO: 70144 - protein, 275 aa, Bacillus sp. LG1
AQTVPWGIPHIKADKAHAAGVTGSGVKVAILDTGIDANHADLNVKGGASFVSGEPNALQDGNGHGTHVAGTVAALNNTTGVLGVAYNADLYAVKVLSASGSGTLSGIAQGIEWSISNGMNVINMSLGGSSGSTALQQACNNAYNRGIVVIAAAGNSGSSGNRNTMGYPARYSSVIAVGAVSSPNTRASFSSVGSELEVMAPGVNILSTTPGNNYASFNGTSMAAPHVAGAAALIKAKYPSMTNVQIRERLKNTATNLGDPFFYGKGVINVESALQ

SEQ ID NO: 70145 - protein, 275 aa, Bacillus sp. LG1
AQTVPWGIPHIKADKAHAAGVTGSGVKVAILDTGIDANHADLNVKGGASFVSGEPNALQDGNGHGTHVAGTVAALNNTTGVLGVAYNADLYAVKVLSASGSGTLSGIAQGIEWSISNGMNVINMSLGGSSGSTALQQACNNAYNRGIVVIAAAGNSGSSGNRNTMGYPARYSSVIAVGAVSSNNTRASFSSVGSELEVMAPGVNILSTTPGNNYASFNGTSMAAPFVAGAAALIKAKYPSMTNVQIRERLKNTATNLGDPFFYGKGVINVESALQ

SEQ ID NO: 70146 - protein, 275 aa, Bacillus sp. LG1
AQTVPWGIPHIKADKAHAAGVTGSGVKVAILDTGIDANHADLNVKGGASFVSGEPNALQDGNGHGTHVAGTVAALNNTTGVLGVAYNADGYAVKVLSASGSGTLSGIAQGIEWSISNGMNVINMSLGGSSGSTALQQACNNAYNRGIVVIAAAGNSGSSGNRNTMGYPARYSSVIAVGAVSSNNTRASFSSVGSELEVMAPGVNILSTTPGNNYASFNGTSMAAPHVAGAAALIKAKYPSMTNVQIRERLKNTATNLGDPFFYGKGVINVESALQ

SEQ ID NO: 70147 - protein, 275 aa, Bacillus sp. LG1
AQTVPWGIPHIKADKAHAAGVTGSGVKVAILDTGIDANHADLEVKGGASFVSGEPNALQDGNGHGTHVAGTVAALNNTTGVLGVAYNADLYAVKVLSASGSGTLSGIAQGIEWSISNGMNVINMSLGGSSGSTALQQACNNAYNRGIVVIAAAGNSGSSGNRNTMGYPARYSSVIAVGAVSSNNTRASFSSVGSELEVMAPGVNILSTTPGNNYASFNGTSMAAPHVAGAAALIKAKYPSMTNVQIRERLKNTATNLGDPFFYGKGVINVESALQ

SEQ ID NO: 70148 - protein, 275 aa, Bacillus sp. LG1
AQTVPWGIPHIKADKAHAAGVTGSGVKVAILDTGIDANHADLNVKGGASFVSGEPNALQDGNGHGTGVAGTVAALNNTTGVLGVAYNADLYAVKVLSASGSGTLSGIAQGIEWSISNGMNVINMSLGGSSGSTALQQACNNAYNRGIVVIAAAGNSGSSGNRNTMGYPARYSSVIAVGAVSSNNTRASFSSVGSELEVMAPGVNILSTTPGNNYASFNGTSMAAPHVAGAAALIKAKYPSMTNVQIRERLKNTATNLGDPFFYGKGVINVESALQ

SEQ ID NO: 70149 - protein, 275 aa, Bacillus sp. LG1
AFTVPWGIPHIKADKAHAAGVTGSGVKVAILDTGIDANHADLNVKGGASFVSGEPNALQDGNGHGTHVAGTVAALNNTTGVLGVAYNADLYAVKVLSASGSGTLSGIAQGIEWSISNGMNVINMSLGGSSGSTALQQACNNAYNRGIVVIAAAGNSGSSGNRNTMGYPARYSSVIAVGAVSSNNTRASFSSVGSELEVMAPGVNILSTTPGNNYASFNGTSMAAPHVAGAAALIKAKYPSMTNVQIRERLKNTATNLGDPFFYGKGVINVESALQ

SEQ ID NO: 70150 - protein, 275 aa, Bacillus sp. LG1
AQTVPWGIPHIKADKAHKAGVTGSGVKVAILDTGIDANHADLNVKGGASFVSGEPNALQDGNGHGTHVAGTVAALNNTTGVLGVAYNADLYAVKVLSASGSGTLSGIAQGIEWSISNGMNVINMSLGGSSGSTALQQACNNAYNRGIVVIAAAGNSGSSGNRNTMGYPARYSSVIAVGAVSSNNTRASFSSVGSELEVMAPGVNILSTTPGNNYASFNGTSMAAPHVAGAAALIKAKYPSMTNVQIRERLKNTATNLGDPFFYGKGVINVESALQ

SEQ ID NO: 70151 - protein, 275 aa, Bacillus sp. LG1
AQTVPWGIPHIKADKAHAAGVTGSGVKVAILDTGIDANHADLNVKGGASFVSGEPNALQDGNGHGTHVAGTVAALNNTTGVLGVAYNADLYAVKVLSASGSGTLSGIAQGIEWSISNGMNVINMSLGGSSGSTALQQACNNAYNRGIVVIAAAGNSGSNGNRNTMGYPARYSSVIAVGAVSSNNTRASFSSVGSELEVMAPGVNILSTTPGNNYASFNGTSMAAPHVAGAAALIKAKYPSMTNVQIRERLKNTATNLGDPFFYGKGVINVESALQ

SEQ ID NO: 70152 - protein, 275 aa, Bacillus sp. LG1
AQTVPWGIPHIKADKAHAAGVTGSGVKVAILDTGIDANHADLNVKGGASFVSGEPNALQDGNGHGTHVAGTVAALNNTTGPLGVAYNADLYAVKVLSASGSGTLSGIAQGIEWSISNGMNVINMSLGGSSGSTALQQACNNAYNRGIVVIAAAGNSGSSGNRNTMGYPARYSSVIAVGAVSSNNTRASFSSVGSELEVMAPGVNILSTTPGNNYASFNGTSMAAPHVAGAAALIKAKYPSMTNVQIRERLKNTATNLGDPFFYGKGVINVESALQ

SEQ ID NO: 70153 - protein, 275 aa, Bacillus sp. LG1
AQTVPWGIPHIKADKAHAAGVTGSGVKVAILDTGIDANHADLNVKGGASFVSGEPNALQDGNGHGTHVAGTVAALNNTTGVLGVAYNADLYAVKVLSASGSGTLSGIAQGIEWSISNGMNVINMSLGGSSGSTALQQACNNAYNRGIGVIAAAGNSGSSGNRNTMGYPARYSSVIAVGAVSSNNTRASFSSVGSELEVMAPGVNILSTTPGNNYASFNGTSMAAPHVAGAAALIKAKYPSMTNVQIRERLKNTATNLGDPFFYGKGVINVESALQ

SEQ ID NO: 70154 - protein, 275 aa, Bacillus sp. LG1
AQTVPWGIPHIKADKAHAAGVTGSGVKVAILDTGIDANHADLNVKGGASFVSGEPNALQDGNGHGTHVAGTVAALNNTTGVLGVAYNADLYAVKVLSASGSGTLSGIAQGIEWSISNGMNVIGMSLGGSSGSTALQQACNNAYNRGIVVIAAAGNSGSSGNRNTMGYPARYSSVIAVGAVSSNNTRASFSSVGSELEVMAPGVNILSTTPGNNYASFNGTSMAAPHVAGAAALIKAKYPSMTNVQIRERLKNTATNLGDPFFYGKGVINVESALQ

SEQ ID NO: 70155 - protein, 275 aa, Bacillus sp. LG1
AQTVPWGIPHIKADKAHAAGVTGSGVKVAILDTGIDANHADLNVKGGASFVSGEPNALQDGNGHGTHVAGTVAALNNTTGVLGVAYNADLYAVKVLSASGSGTLSGIAQGIEWSISKGMNVINMSLGGSSGSTALQQACNNAYNRGIVVIAAAGNSGSSGNRNTMGYPARYSSVIAVGAVSSNNTRASFSSVGSELEVMAPGVNILSTTPGNNYASFNGTSMAAPHVAGAAALIKAKYPSMTNVQIRERLKNTATNLGDPFFYGKGVINVESALQ

SEQ ID NO: 70156 - protein, 275 aa, Bacillus sp. LG1
AQTVPWGIPHIKADKAHAAGVTGSGVKVAILDTGIDANHADLNVKGGASFVSGEPNALQDGNGHGTHVAGTVAALNNTTGVLGVAYNADLYAVKVLSASGSGTLSGIAQGIEWSISNGMNVINMSLGGSSGSTALQQACNNAYNRGIVVIAASGNSGSSGNRNTMGYPARYSSVIAVGAVSSNNTRASFSSVGSELEVMAPGVNILSTTPGNNYASFNGTSMAAPHVAGAAALIKAKYPSMTNVQIRERLKNTATNLGDPFFYGKGVINVESALQ

SEQ ID NO: 70157 - protein, 275 aa, Bacillus sp. LG1
AQTVPWGIPHIKADKAHAAGVTGSGVKVAILDTGIDANHADLNVKGGASFVSGEPNALQDGNGHGTHVAGTVAALNNTTGVLGVAYNADLYAVKVLSASGSGTLSGIAQGIEWSISNGMNVINMSLGGSSGSTALQQACNNAYNRGIVVIAAAGNSGSSGNRNTMGYPARYSSVIAVGAVSSNNTRASFSSVGSELEVMAPGVNILSTTPGNNYASFNGTSMAAPHVAGAAALIKAKYPSMTNVQIRERLKNTATNLGDPFFTGKGVINVESALQ

SEQ ID NO: 70158 - protein, 275 aa, Bacillus sp. LG1
AQTVPWGIPHIKADKAHAAGVTGSGVKVAILDTGIDANHADLNVKGGASFVSGEPNALQDGNGHGTHVAGTVAALNNTTGVLGVAYNADLYAVKVLSASGSGTLSGIAQGIEWSISNGMNVINMSLGGSSGSTALQQACNNAYNRHIVVIAAAGNSGSSGNRNTMGYPARYSSVIAVGAVSSNNTRASFSSVGSELEVMAPGVNILSTTPGNNYASFNGTSMAAPHVAGAAALIKAKYPSMTNVQIRERLKNTATNLGDPFFYGKGVINVESALQ

SEQ ID NO: 70159 - protein, 275 aa, Bacillus sp. LG1
AQTVPWGIPHIKADKAHAAGVTGSGVKVAILDTGIDANHADLNVKGGASFVSGEPNALQDGNGHGTHVAGTVAALNNTTGVLGVAYNADLYAVKVLSASGSGTLSGIAQGIEWSISTGMNVINMSLGGSSGSTALQQACNNAYNRGIVVIAAAGNSGSSGNRNTMGYPARYSSVIAVGAVSSNNTRASFSSVGSELEVMAPGVNILSTTPGNNYASFNGTSMAAPHVAGAAALIKAKYPSMTNVQIRERLKNTATNLGDPFFYGKGVINVESALQ

SEQ ID NO: 70160 - protein, 275 aa, Bacillus sp. LG1
AQTVPWGIPHIKADKAHAAGVTGSGVKQAILDTGIDANHADLNVKGGASFVSGEPNALQDGNGHGTHVAGTVAALNNTTGVLGVAYNADLYAVKVLSASGSGTLSGIAQGIEWSISNGMNVINMSLGGSSGSTALQQACNNAYNRGIVVIAAAGNSGSSGNRNTMGYPARYSSVIAVGAVSSNNTRASFSSVGSELEVMAPGVNILSTTPGNNYASFNGTSMAAPHVAGAAALIKAKYPSMTNVQIRERLKNTATNLGDPFFYGKGVINVESALQ

SEQ ID NO: 70161 - protein, 275 aa, Bacillus sp. LG1
AQTVPWGIPHIKADKAHAAGVTGSGVKVAILDTGIDANHADLNVKGGASFVSGEPNALQDGNGHGTHVAGTVAALNNTTGVLGVAYNADLYAVKVLSASGSGTLSGIAQGIEWSISNGMNVINMSLGGSSGSTALQQACNNAYNRGIVVIAAAGNSGSSGNRNTMGYPARYSSVIAVGAVSSNNTRASFSSVGSELEVMAPGVNILSTTPGPNYASFNGTSMAAPHVAGAAALIKAKYPSMTNVQIRERLKNTATNLGDPFFYGKGVINVESALQ

SEQ ID NO: 70162 - protein, 275 aa, Bacillus sp. LG1
AQTVPWGIPHIKADKAHAAGVTGSGVKVAILDTGIDANHADLNVKGGASFVSGEPNALQDGNGHGTHVAGTVAALNNTTGVLGVAYNADRYAVKVLSASGSGTLSGIAQGIEWSISNGMNVINMSLGGSSGSTALQQACNNAYNRGIVVIAAAGNSGSSGNRNTMGYPARYSSVIAVGAVSSNNTRASFSSVGSELEVMAPGVNILSTTPGNNYASFNGTSMAAPHVAGAAALIKAKYPSMTNVQIRERLKNTATNLGDPFFYGKGVINVESALQ

SEQ ID NO: 70163 - protein, 275 aa, Bacillus sp. LG1
AQTVPWGIPHIKADKAHAAGVTGSGVKVAILDTGIDANHADLNVKGGASFVSGEPNALQDGNGHGTHVAGTVGALNNTTGVLGVAYNADLYAVKVLSASGSGTLSGIAQGIEWSISNGMNVINMSLGGSSGSTALQQACNNAYNRGIVVIAAAGNSGSSGNRNTMGYPARYSSVIAVGAVSSNNTRASFSSVGSELEVMAPGVNILSTTPGNNYASFNGTSMAAPHVAGAAALIKAKYPSMTNVQIRERLKNTATNLGDPFFYGKGVINVESALQ

SEQ ID NO: 70164 - protein, 275 aa, Bacillus subtilis
AQVVPYGISQIKAPALHSQGYTGSNVKVAVIDSGIDSSHEDLNVRGGASFVPSETNPYQDGSSHGTHVAGTIAALDNSIGVLGVAPSASLYAVKVLDSTGSGQYSWIINGIEWAISNNMDVINMSLGGPTGSTALKTVVDKAVSSGIVVAAAAGNEGSSGSTSTVGYPAKYPSTIAVGAVNSSNQRASFSSAGSELDVMAPGVSIQSTLPGGTYGAYNGTSMATPHVAGAAALILSKHPTWTNAQVRDRLESTATYLGNSFYYGKGLINVQAAAQ

SEQ ID NO: 70165 - protein, 275 aa, Bacillus subtilis
AQSVPYGISQIKAPALHSQGYTGSNVKVAVIDSGIDSSHPDLNVRGGASFVPSETNPYQDGSSHGTHVAGTIAALNNTIGVLGVAPSASLYAVKVLDSTGSGQYSWIINGIEWAISNNMDVINISLGGPTGSTALKTVVDKAVSSGIVVAAAAGNEGSSGSTSTVGYPAKYPSTIAVGAVNSSNQRASFSSAGSELDVMAPGVSIQSTLPGGTYGAYNGTSMATPHVAGAAALILSKHPTWTNAQVRDRLESTATYLGNSFYYGKGLINVQAAAQ

SEQ ID NO: 70166 - protein, 275 aa, Bacillus subtilis
AQVVPYGISQIKAPALHSQGYTGSNVKVAVIDSGIDSSHPDLNVRGGASFVPSETNPYQDGSSHGTHVAGTIAALDNSIGVLGVAPSASLYAVKVLDSTGSGQYSWIINGIEWAISNNMDVINMSLGGPTGSTALKTVVDKAVSSGIVVAAAAGNEGSSGSTSTVQYPAKYPSTIAVGAVNSSNQRASFSSAGSELDVMAPGVSIQSTLPGGTYGAYNGTSMATPHVAGAAALILSKHPTWTNAQVRDRLESTATYLGPSFYYGKGLINVQAAAQ

SEQ ID NO: 70167 - protein, 275 aa, Bacillus subtilis
AQSVPYGISQIKAPALHSQGYTGSNVKVAVIDSGIDSSHPDLNVRGGASFVPSETNPYQDGSSHGTHVAGTIAALNNSIGVLGVAPSASLYAVKVLDSTGSGQYSWIINGIEWAISNNMDVINMSLGGPTGSTALKTVVDKAVSSGIVVAAAAGNEGSSGSTSTVGYPAKYPSTIAVGAVNSSNQRASFSSAGSELDVMAPGVSIQSTLPGGTYGAYNGTSMATPHVAGAAALILSKHPTWTNAQVRDRLESTATYLGPSFYYGKGLINVQAAAQ

SEQ ID NO: 70168 - protein, 274 aa, Bacillus sp.
QTVPWGIPHIKADKAHAAGVTGSGVKVAILDTGIDANHADLNVKGGASFVSGEPNALQDGNGHGTHVAGTVAALDNSIGVLGVAPSVSLYAVKVLGASGSGSVSSIAQGLEWAGNNGMHVANLSLGSPSPSATLEQAVNSATSRGVLVVAAAGNSGTSGNRNTMDYPARYSSVIAVGAVSSNNTRASFSSVGSELEVMAPGVNILSTYPGSTYATLNGTSMAAPHVAGAAALIKAKYPSMTNVQIRNRLKNTATNLGDPFFYGKGVINVESALQ

SEQ ID NO: 70169 - protein, 275 aa, Bacillus subtilis
AQSVPYGIEQIKAPALHSQGYTGSNVKVAVIDSGIDSSHPDLNVRGGASFVPSETNPYQDGSSHGTHVAGTIAALDNSIGVLGVAPSASLYAVKVLDSTGSGQYSWIINGIEWAISNNMDVINMSLGGPTGSTALKTVVDKAVSSGIVVAAAAGNEGSSGSTSTVQYPAKYPSTIAVGAVNSSNQRASFSSAGSELDVMAPGVSIQSTLPGGTYGAYNGTSMATPHVAGAAALILSKHPTWTNAQVRDRLESTATYLGNSFYYGKGLINVQAAAQ

SEQ ID NO: 70170 - protein, 275 aa, Bacillus subtilis
AQSVPYGISQIKAPALHSQGYTGSNVKVAVIDSGIDSSHEDLNVRGGASFVPSETNPYQDGSSHGTHVAGTIAALDNNIGVLGVAPSASLYAVKVLDSTGSGQYSWIINGIEWAISNNMDVINMSLGGPTGSTALKTVVDKAVSSGIVVAAAAGNEGSSGSTSTVGYPAKYPSTIAVGAVNSSNQRASFSSAGSELDVMAPGVSIQSTLPGGTYGAYNGTSMATPHVAGAAALILSKHPTWTNAQVRDRLESTATYLGNSFYYGKGLINVQAAAQ

SEQ ID NO: 70171 - protein, 275 aa, Bacillus subtilis
AQSVPYGISQIKAPALHSQGYTGSNVKVAVIDSGIDSSHPDLNVRGGASFVPSETNPYQDGSSHGTHVAGTIAALNNSIGVLGVAPSASLYAVKVLDSTGSGQYSWIINGIEWAISNNMDVINMSLGGPTGSTALKTVVDKAVSSGIVVVAAAGNEGSSGSTSTVGYPAKYPSTIAVGAVNSSNQRAPFSSAGSELDVMAPGVSIQSTLPGGTYGAYNGTSMATPHVAGAAALILSKHPTWTNAQVRDRLESTATYLGNSFYYGKGLINVQAAAQ

SEQ ID NO: 70172 - protein, 275 aa, Bacillus subtilis
AQSVPYGIEQIKAPALHSQGYTGSNVKVAVIDSGIDSSHPDLNVRGGASFVPSETNPYQDGSSHGTHVSGTIAALDNSIGVLGVAPSASLYAVKVLDSTGSGQYSWIINGIEWAISNNMDVINMSLGGPTGSTALKTVVDKAVSSGIVVAAAAGNEGSSGSTSTVGYPAKYPSTIAVGAVNSSNQRASFSSAGSELDVMAPGVSIQSTLPGGTYGAYNGTSMATPHVAGAAALILSKHPTWTNAQVRDRLESTATYLGNSFYYGKGLINVQAAAQ

SEQ ID NO: 70173 - protein, 275 aa, Bacillus subtilis
AQSVPYGISQIKAPALHSQGYTGSNVKVAVIDSGIDSSHPDLNVRGGASFVPSETNPYQDGSSHGTHVAGTIAALNNSIGVLGVAPSASLYAVKVLDSTGSGQYSWIINGIEWAISNNMDVINMSLGGPTGSTALKTVVDKAVSSGIVVVAAAGNEGSSGSTSTVGYPAKYPSTIAVGAVNSSNQRASFSSAGSELDVMAPGVSIQSTLPGGTYGAYNGTSMATPHVAGAAALILSKHPTWTNAQVRDRLESTAAYLGNSFYYGKGLINVQAAAQ

SEQ ID NO: 70174 - protein, 275 aa, Bacillus subtilis
AQSVPYGISQIKAPALHSQGYTGSNVKVAVIDSGIDSSHPDLNVRGGASFVPSETNPYQDGSSHGTHVAGTIAALNNSIGVLGVAPNASLYAVKVLDSTGSGQYSWIINGIEWAISNNMDVINMSLGGPSGSTALKTVVDKAVSNGIVVAAAAGNEGSSGSTSTVGYPAKYPSTIAVGAVNSSNQRASFSSAGPELDVMAPGVSIQSTLPGGTYGAYNGTSMATPHVAGAAALILSKHPTWTNAQVRDRLESTATYLGNSFYYGKGLINVQAAAQ

SEQ ID NO: 70175 - protein, 275 aa, Bacillus subtilis
AQVVPYGISQIKAPALHSQGYTGSNVKVAVIDSGIDSSHPDLNVRGGASFVPSETNPYQDGSSHGTHVAGTIAALDNSIGVLGVAPSASLYAVKVLDSTGSGQYSWIINGIEWAISNNMDVINMSLGGPTGSTALKTVVDKAVSSGIVVAAAAGNEGSSGSTSTVGYPAKYPSTIAVGAVNSSNQRASFSSAGSELDVMAPGVSIQSTLPGGTYGAYSGTSMATPHVAGAAALILSKHPTWTNAQVRDRLESTATYLGPSFYYGKGLINVQAAAQ

SEQ ID NO: 70176 - protein, 275 aa, Bacillus subtilis
AQSVPYGISQIKAPALHSQGYTGSNVKVAVIDSGIDSSHPDLNVRGGASFVPSETNPYQDGSSHGTHVAGTIAALNNSIGVLGVAPSASLYAVKVLDSTGSGQYSWIINGIEWAISNNMDVINMSLGGPSGSTALKTVVDKAASSGIVVAAAAGNEGSSGSSSTVGYPAKYPSTIAVGAVNSSNQRASFSSAGSELDVMAPGVSIQSTLPGGTYGAYNGTSMATPHVAGAAALILSKHPTWTNAQVRDRLESTATYLGNSFYYGKGLINVQAAAQ

SEQ ID NO: 70177 - protein, 275 aa, Bacillus subtilis
AQSVPYGISQIKAPALHSQGYTGSNVKVAVIDSGIDSSHPDLNVRGGASFVPSETNPYQDGSSHGTHVAGTIAALDNSIGVLGVAPSASLYAVKVLDSTGSGQYSWIINGIEWAISNNMDVINMSLGGPTGSTALKTVVDKAVSSGIVVAAAAGNEGSSGSTSTVQYPAKYPSTIAVGAVNSSNQRASFSSAGSELDVMAPGVSIQSTLPGGTYGAYNGTSMATPHVAGAAALILSKHPTWTNAQVRDRLESTATYLGNSFYYGKGLINVQAAAQ

SEQ ID NO: 70178 - protein, 275 aa, Bacillus subtilis
AQSVPYGISQIKAPALHSQGYTGSNVKVAVIDSGIDSSHEDLNVRGGASFVPSETNPYQDGSSHGTHVAGTIAALDNSIGVLGVAPSASLYAVKVLDSTGSGQYSWIINGIEWAISNNMDVINMSLGGPTGSTALKTVVDKAVSSGIVVAAAAGNEGSSGSTSTVGYPAKYPSTIAVGAVNSSNQRASFSSAGSELDVMAPGVSIQSTLPGGTYGAYNGTSMATPHVAGAAALILSKHPTWTNAQVRDRLESTATYLGPSFYYGKGLINVQAAAQ

SEQ ID NO: 70179 - protein, 275 aa, Bacillus subtilis
AQSVPYGIEQIKAPALHSQGYTGSNVKVAVIDSGIDSSHPDLNVRGGASFVPSETNPYQDGSSHGTHVAGTIAALNNNIGVLGVAPSASLYAVKVLDSTGSGQYSWIINGIEWAISNNMDVINMSLGGPTGSTALKTVVDKAVSSGIVVAAAAGNEGSSGSTSTVGYPAKYPSTIAVGAVNSSNQRASFSSAGSELDVMAPGVSIQSTLPGGTYGAYNGTSMATPHVAGAAALILSKHPTWTNAQVRDRLESTATYLGPSFYYGKGLINVQAAAQ

SEQ ID NO: 70180 - protein, 275 aa, Bacillus subtilis
AQSVPYGISQIKAPALHSQGYTGSNVKVAVIDSGIDSSHPDLNVRGGASFVPSETNPYQDGSSHGTHVAGTIAALDNNIGVLGVAPSASLYAVKVLDSTGSGQYSWIINGIEWAISNNMDVINMSLGGPTGSTALKTVVDKAVSSGIVVAAAAGNEGSSGSTSTVGYPAKYPSTIAVGAVNSSNQRASFSSAGSELDVMAPGVSIQSTLPGGTYGAYSGTSMATPHVAGAAALILSKHPTWTNAQVRDRLESTATYLGNSFYYGKGLINVQAAAQ

SEQ ID NO: 70181 - protein, 275 aa, Bacillus subtilis
AQSVPYGISQIKAPALHSQGYTGSNVKVAVIDSGIDSSHPDLNVRGGASFVPSETNPYQDGSSHGTHVAGTIAALNNSIGVLGVAPSASLYAVKVLDSTGSGQYSWIINGIEWAISNNMDVINMSLGGPTDSTALKTVVDKAVSSGIVVVAAAGNEGSSGSTSTVGYPAKYPSTIAVGAVNSSNQRASFSSAGSELDVMAPGVSIQSTLPGGTYGAYNGTSMATPHVAGAAALILSKHPTWTNAQVRDRLESTATYLGNSFYYGKGLINVQAAAQ

SEQ ID NO: 70182 - protein, 275 aa, Bacillus subtilis
AQSVPYGIEQIKAPALHSQGYTGSNVKVAVIDSGIDSSHEDLNVRGGASFVPSETNPYQDGSSHGTHVAGTIAALDNSIGVLGVAPSASLYAVKVLDSTGSGQYSWIINGIEWAISNNMDVINMSLGGPTGSTALKTVVDKAVSSGIVVAAAAGNEGSSGSTSTVGYPAKYPSTIAVGAVNSSNQRASFSSAGSELDVMAPGVSIQSTLPGGTYGAYNGTSMATPHVAGAAALILSKHPTWTNAQVRDRLESTATYLGNSFYYGKGLINVQAAAQ

SEQ ID NO: 70183 - protein, 275 aa, Bacillus subtilis
AQVVPYGISQIKAPALHSQGYTGSNVKVAVIDSGIDSSHPDLNVRGGASFVPSETNPYQDGSSHGTHVAGTIAALDNSIGVLGVAPSASLYAVKVLDSTGSGQYSWIINGIEWAISNNMDVINMSLGGPTGSTALKTVVDKAVSSGIVVAAAAGNEGSSGSTSTVQYPAKYPSTIAVGAVNSSNQRASFSSAGSELDVMAPGVSIQSTLPGGTYGAYNGTSMATPHVAGAAALILSKHPTWTNAQVRDRLESTATYLGNSFYYGKGLINVQAAAQ

SEQ ID NO: 70184 - protein, 275 aa, Bacillus subtilis
AQVVPYGISQIKAPALHSQGYTGSNVKVAVIDSGIDSSHPDLNVRGGASFVPSETNPYQDGSSHGTHVAGTIAALDNSIGVLGVAPSASLYAVKVLDSTGSGQYSWIINGIEWAISNNMDVINMSLGSPTGSTALKTVVDKAVSSGIVVAAAAGNEGSSGSTSTVGYPAKYPSTIAVGAVNSSNQRASFSSAGSELDVMAPGVSIQSTLPGGTYGAYNGTSMATPHVAGAAALILSKHPTWTNAQVRDRLESTATYLGPSFYYGKGLINVQAAAQ

SEQ ID NO: 70185 - protein, 275 aa, Bacillus subtilis
AQSVPYGISQIKAPALHSQGYTGSNVKVAVIDSGIDSSHPDLNVRGGASFVPSETNPYQDGSSHGTHVAGTIAALNNSIGVLGVAPSASLYAVKVLDSTGSGGYSWIINGIEWAISNNMDVINMSLGGPTGSTALKTVVDKAVSSGIVVAAAAGNEGSSGSTSTVGYPAKYPSTIAVGAVNSSNQRASFSSVGSELDVMAPGVSIQSTLPGGTYGAYNGTSMATPHVAGAAALILSKHPTWTNAQVRDRLESTATPLGNSFYYGKGLINVQAAAQ

SEQ ID NO: 70186 - protein, 275 aa, Bacillus subtilis
AQSVPYGISQIKAPALHSQGYTGSNVKVAVIDSGIDSSHEDLNVRGGASFVPSETNPYQDGSSHGTHVAGTIAALDNSIGVLGVAPSASLYAVKVLDSTGSGQYSWIINGIEWAISNNMDVINMSLGGPTGSTALKTVVDKAVSSGIVVAAAAGNEGSSGSTSTVGYPAKYPSTIAVGAVNSSNQRASFSSAGSELDVMAPGVSIQSTLPGGTYGAYNGTSMATPHVAGAAALILSKHPTWTNAQVRDRLESTATYLGNSFYYGKGLINVQAAAQ

SEQ ID NO: 70187 - protein, 275 aa, Bacillus subtilis
AQSVPYGISQIKAPALHSQGYTGSNVKVAVIDSGIDSSHPDLNVRGGASFVPSETNPYQDGSSHGTHVSGTIAALDNSIGVLGVAPSASLYAVKVLDSTGSGQYSWIINGIEWAISNNMDVINMSLGGPTGSTALKTVVDKAVSSGIVVAAAAGNEGSSGSTSTVGYPAKYPSTIAVGAVNSSNQRASFSSAGSELDVMAPGVSIQSTLPGGTYGAYNGTSMATPHVAGAAALILSKHPTWTNAQVRDRLESTATYLGPSFYYGKGLINVQAAAQ

SEQ ID NO: 70188 - protein, 275 aa, Bacillus subtilis
AQSVPYGISQIKAPALHSQGYTGSNVKVAVIDSGIDSSHPDLNVRGGASFVPSETNPYQDGSSHGTHVAGTIAALNNSIGVLGVAPSASLYAVKVLDSTGSGQYSWIINGIEWAISNNMDVINMSLGGPTGSTALKTVVDKAVSSGIVVAAAAGNEGSSGSTSTVGYPAKYPSTIAVGAVNSSNQRASFSSVGSELDVMAPGVSIQSTLPGGTYGAYDGTSMATPHVAGAAALILSKHPTWTNAQVRDRLESTATYLGNSFYYGKGLINVQAAAQ

SEQ ID NO: 70189 - protein, 275 aa, Bacillus subtilis
AQVVPYGISQIKAPALHSQGYTGSNVKVAVIDSGIDSSHPDLNVRGGASFVPSETNPYQDGSSHGTHVSGTIAALDNSIGVLGVAPSASLYAVKVLDSTGSGQYSWIINGIEWAISNNMDVINMSLGGPTGSTALKTVVDKAVSSGIVVAAAAGNEGSSGSTSTVGYPAKYPSTIAVGAVNSSNQRASFSSAGSELDVMAPGVSIQSTLPGGTYGAYNGTSMATPHVAGAAALILSKHPTWTNAQVRDRLESTATYLGNSFYYGKGLINVQAAAQ

SEQ ID NO: 70190 - protein, 275 aa, Bacillus subtilis
AQSVPYGISQIKAPALHSQGYTGSNVKVAVIDSGIDSSHPDLNVRGGASFVPSETNPYQDGSSHGTHVSGTIAALDNSIGVLGVAPSASLYAVKVLDSTGSGQYSWIINGIEWAISNNMDVINMSLGGPTGSTALKTVVDKAVSSGIVVAAAAGNEGSSGSTSTVGYPAKYPSTIAVGAVNSSNQRASFSSAGSELDVMAPGVSIQSTLPGGTYGAYNGTSMATPHVAGAAALILSKHPTWTNAQVRDRLESTATYLGNSFYYGKGLINVQAAAQ

SEQ ID NO: 70191 - protein, 275 aa, Bacillus subtilis subsp. natto
AQSVPYGISQIKAPALHSQGYTGSNVKVAVIDSGIDSSHPDLNVRGGASFVPSETNPYQDGSSHGTHVAGTIAALNNSIGVLGVAPSASLYAVKVLDSTGSGQYSWIINGIEWAISNNMDVINMSLGGPTGSTALKTVVDKAVSSGIVVAAAAGNEGSSGSTSTVGTPAKYPSTIAVGAVNSSNQRASFSSVGSELDVMAPGVSIQSTLPGGTYGAYNGTSMATPHVAGAAALILSKHPTWTNAQVRDRLESTATYLGNSFYYGKGLINVQAAAQ

SEQ ID NO: 70192 - protein, 275 aa, Bacillus subtilis
AQVVPYGIEQIKAPALHSQGYTGSNVKVAVIDSGIDSSHPDLNVRGGASFVPSETNPYQDGSSHGTHVAGTIAALNNSIGVLGVAPSASLYAVKVLDSTGSGQYSWIINGIEWAISNNMDVINMSLGGPTGSTALKTVVDKAVSSGIVVAAAAGNEGSSGSTSTVGYPAKYPSTIAVGAVNSSNQRASFSSAGSELDVMAPGVSIQSTLPGGTYGAYNGTSMATPHVAGAAALILSKHPTWTNAQVRDRLESTATYLGPSFYYGKGLINVQAAAQ

SEQ ID NO: 70193 - protein, 275 aa, Unidentified
AQSVPYGISQIKAPALHSQGYTGSNVKVAVIDSGIDSSHPDLNVRGGASFVPSETNPYQDGSSHGTHVAGTIAALNNSIGVLGVAPSASLYAVKVLDSTGSGQYSWIINGIEWAISNNMDVINMSLGGPTGSTALKTVVDKAVSSGIVVAAAAGNEGSSGSTSTVGYPAKYPSTIAVGAVNSSNQRASFSSAGSELDVMAPGVSIQSTLPGGTYGAYNGTSMATPHVAGAAALILSKHPTWTNAQVRDRLESTATYLGNSFYYGKGLINVQAAAQ

SEQ ID NO: 70194 - protein, 275 aa, Bacillus subtilis
AQSVPYGISQIKAPALHSQGYTGSNVKVAVIDSGIDSSHPDLNVRGGASFVPSETNPYQDGSSHGTHVAGTIAALDNSIGVLGVAPSASLYAVKVLDSTGSGQYSWIISGIEWAISNNMDVINMSLGGPTGSTALKTVVDKAVSSGIVVAAAAGNEGSSGSTSTVGYPAKYPSTIAVGAVNSSNQRASFSSAGSELDVMAPGVSIQSTLPGGTYGAYSGTSAATPHVAGAAALILSKHPTWTNAQVRDRLESTATYLGNSFYYGKGLINVQAAAQ

SEQ ID NO: 70195 - protein, 275 aa, Bacillus subtilis
AQSVPYGISQIKAPALHSQGYTGSNVKVAVIDSGIDSSHPDLNVRGGASFVPSETNPYQDGSSHGTHVAGTIAALDNSIGVLGVAPSASLYAVKVLDSTGSGQYSWIINGIEWAISNNMDVINMSLGSPTGSTALKTVVDKAVSSGIVVAAAAGNEGSSGSTSTVGYPAKYPSTIAVGAVNSSNQRASFSSAGSELDVMAPGVSIQSTLPGGTYGAYNGTSMATPHVAGAAALILSKHPTWTNAQVRDRLESTATYLGNSFYYGKGLINVQAAAQ

SEQ ID NO: 70196 - protein, 275 aa, Bacillus subtilis
AQVVPYGISQIKAPALHSQGYTGSNVKVAVIDSGIDSSHEDLNVRGGASFVPSETNPYQDGSSHGTHVAGTIAALDNNIGVLGVAPSASLYAVKVLDSTGSGQYSWIINGIEWAISNNMDVINMSLGGPTGSTALKTVVDKAVSSGIVVAAAAGNEGSSGSTSTVGYPAKYPSTIAVGAVNSSNQRASFSSAGSELDVMAPGVSIQSTLPGGTYGAYNGTSMATPHVAGAAALILSKHPTWTNAQVRDRLESTATYLGNSFYYGKGLINVQAAAQ

SEQ ID NO: 70197 - protein, 275 aa, Bacillus subtilis
AQSVPYGISQIKAPALHSQGYTGSNVKVAVIDSGIDSSHPDLNVRGGASFVPSETNPYQDGSSHGTHVAGTIAALNNSIGVLGVAPSASLYAVKVLDSTGSGQYSWIINGIEWAISNNMDVINMSLGGPTGSTALKTVVDKAVSSGIVVVAAAGNEGSSGSTSTVGYPAKYPSTIAVGAVNGSNQRASFSSAGSELDVMAPGVSIQSTLPGGTYGAYNGTSMATPHVAGAAALILSKHPTWTNAQVRDRLESTATYLGNSFYYGKGLINVQAAAQ

SEQ ID NO: 70198 - protein, 275 aa, Bacillus subtilis
AQSVPYGISQIKAPALHSQGYTGSNVKVAVIDSGIDSSHPDLNVRGGASFVPSETNPYQDGSSHGTHVAGTIAALNNNIGVLGVAPSASLYAVKVLDSTGSGQYSWIINGIEWAISNNMDVINMSLGGPTGSTALKTVVDKAVSSGIVVAAAAGNEGSSGSTSTVGYPAKYPSTIAVGAVNSSNQRASFSSAGSELDVMAPGVSIQSTLPGGTYGAYNGTSMATPHVAGAAALILSKHPTWTNAQVRDRLESTATYLGNSFYYGKGLINVQAAAQ

SEQ ID NO: 70199 - protein, 275 aa, Bacillus subtilis
AQSVPYGISQIKAPALHSQGYTGSNVKVAVIDSGIDSSHPDLNVRGGASFVPSETNPYEDGSSHGTHVAGTIAALNNSIGVLGVAPSASLYAVKVLDSTGSGQYSWIINGIEWAISNNMDVINMSLGGPTGSTALKTVVDKAVSSGIVVAAAAGNEGSSGSTSTVGYPAKYPSTIAVGAVNSSNQRASFSSVGSELDVMAPGVSIQSTLPGGTYGAYDGTSMATPHVAGAAALILSKHPTWTNAQVRDRLESTATYLGNSFYYGKGLINVQAAAQ

SEQ ID NO: 70200 - protein, 275 aa, Bacillus subtilis
AQSVPYGISQIKAPALHSQGYTGSNVKVAVIDSGIDSSHPDLNVRGGASFVPSETNPYQDGSSHGTHVAGTIAALNNSIGVLGVAPSASLYAVKVLDSTGSGQYSWIINGIEWAISNNMDVINMSLGGPSGSTALKTVVDKAVSSGIVVAAAAGNEGSSGSSSTVGYPAKYPSTIAVGAVNSSNQRASFSSAGSELDVMAPGVSIQSTLPGGTYGAYNGTSMATPHVAGAAALILSKHPTWTNAQVRDRLESTATYLGNSFYYGKGLINVQAAAQ

SEQ ID NO: 70201 - protein, 275 aa, Bacillus subtilis
AQSVPYGISQIKAPALHSQGYTGSNVKVAVIDSGIDSSHPDLNVRGGASFVPSETNPYQDGSSHGTHVSGTIAALDNNIGVLGVAPSASLYAVKVLDSTGSGQYSWIINGIEWAISNNMDVINMSLGGPTGSTALKTVVDKAVSSGIVVAAAAGNEGSSGSTSTVGYPAKYPSTIAVGAVNSSNQRASFSSAGSELDVMAPGVSIQSTLPGGTYGAYNGTSMATPHVAGAAALILSKHPTWTNAQVRDRLESTATYLGNSFYYGKGLINVQAAAQ

SEQ ID NO: 70202 - protein, 275 aa, Bacillus subtilis
AQSVPYGISQIKAPALHSQGYTGSNVKVAVLDSGIDSSHPDLNVRGGASFVPSETNPYQDGSSHGTHVAGTIAALNNSIGVLGVSPSASLYAVKVLDSTGSGQYSWIINGIEWAISNNMDVINMSLGGPTGSTALKTVVDKAVSSGIVVAAAAGNEGSSGSTSTVGYPAKYPSTIAVGAVNSSNQRASFSSAGSELDVMAPGVSIQSTLPGGTYGAYNGTSMATPHVAGAAALILSKHPTWTNAQVRDRLESTATYLGNSFYYGKGLINVQAAAQ

SEQ ID NO: 70203 - protein, 275 aa, Bacillus subtilis
AQSVPYGIEQIKAPALHSQGYTGSNVKVAVIDSGIDSSHPDLNVRGGASFVPSETNPYQDGSSHGTHVAGTIAALDNSIGVLGVAPSASLYAVKVLDSTGSGQYSWIINGIEWAISNNMDVINMSLGGPTGSTALKTVVDKAVSSGIVVAAAAGNEGSSGSTSTVGYPAKYPSTIAVGAVNSSNQRASFSSAGSELDVMAPGVSIQSTLPGGTYGAYSGTSMATPHVAGAAALILSKHPTWTNAQVRDRLESTATYLGNSFYYGKGLINVQAAAQ

SEQ ID NO: 70204 - protein, 275 aa, Bacillus subtilis
AQSVPYGISQIKAPALHSQGYTGSNVKVAVIDSGIDSSHPDLNVRGGASFVPSETNPYQDGSSHGTHVAGTIAALNNSIGVLGVSPSASLYAVKVLDSTGSGQYSWIINGIEWAISNNMDVINMSLGGPTGSTALKTVVDKAVSSGIVVAAAAGNEGSSGSTSTVGYPAKYDSTIAVGAVNSSNQRASFSSAGSELDVMAPGVSIQSTLPGGTYGAYNGTSMATPHVAGAAALILSKHPTWTNAQVRDRLESTATYLGNSFYYGKGLINVQAAAQ

SEQ ID NO: 70205 - protein, 275 aa, Bacillus subtilis
AQVVPYGIEQIKAPALHSQGYTGSNVKVAVIDSGIDSSHPDLNVRGGASFVPSETNPYQDGSSHGTHVAGTIAALNNSIGVLGVAPSASLYAVKVLDSTGSGQYSWIINGIEWAISNNMDVINMSLGGPTGSTALKTVVDKAVSSGIVVAAAAGNEGSSGSTSTVGYPAKYPSTIAVGAVNSSNQRASFSSAGSELDVMAPGVSIQSTLPGGTYGAYNGTSMATPHVAGAAALILSKHPTWTNAQVRDRLESTATYLGNSFYYGKGLINVQAAAQ

SEQ ID NO: 70206 - protein, 275 aa, Bacillus subtilis
AQSVPYGIEQIKAPALHSQGYTGSNVKVAVIDSGIDSSHPDLNVRGGASFVPSETNPYQDGSSHGTHVAGTIAALNNSIGVLGVAPSASLYAVKVLDSTGSGQYSWIINGIEWAISNNMDVINMSLGGPTGSTALKTVVDKAVSSGIVVAAAAGNEGSSGSTSTVGYPAKYPSTIAVGAVNSSNQRASFSSAGSELDVMAPGVSIQSTLPGGTYGAYNGTSMATPHVAGAAALILSKHPTWTNAQVRDRLESTATYLGPSFYYGKGLINVQAAAQ

SEQ ID NO: 70207 - protein, 275 aa, Bacillus subtilis
AQSVPYGISQIKAPALHSQGYTGSNVKVAVIDSGIDSSHPDLNVRGGASFVPSETNPYQDGSSHGTHVAGTVAALNNSIGVLGVAPNASLYAVKVLDSTGNGQYSWIINGIEWAISNKMDVINMSLGGPSGSTALKSVVDRAVASGIVVVAAAGNEGTSGSSSTIGYPAKYPSTIAVGAVNSSNQRGSFSSVGPELDVMAPGVSIQSTLPGGTYGAYNGTSMATPHVAGAAALILSKHPTWTNAQVRDRLESTTTYLGNSFYYGKGLINVQAAAQ

SEQ ID NO: 70208 - protein, 275 aa, Bacillus subtilis
AQSVPYGISQIKAPALHSQGYTGSNVKVAVIDSGIDSSHPDLNVRGGASFVPSETNCYQDGASHGTHVAGTIAALNNSIGVLGVAPSASLYCVKVLDSTGSGQYSWIINGIEWAISNNMDVINMSLGGPTGSTALKTVVDKAVSSGIVVAAAAGNEGSSGSTSTVGYPAKYPSTIAVGAVDSSNQRASFSSVGSELDVMAPGVSIQSTLPGGTYGAKSGTSMATPHVAGAAALILSKHPTWTNAQVRDRLESTATYLGPSFYYGKGLINVQAAAQ

SEQ ID NO: 70209 - protein, 275 aa, Bacillus subtilis
AQVVPYGISQIKAPALHSQGYTGSNVKVAVIDSGIDSSHPDLNVRGGASFVPSETNPYQDGSSHGTHVAGTIAALNNSIGVLGVAPSASLYAVKVLDSTGSGQYSWIINGIEWAISNNMDVINMSLGGPTGSTALKTVVDKAVSSGIVVAAAAGNEGSSGSTSTVGYPAKYPSTIAVGAVNSSNQRASFSSAGSELDVMAPGVSIQSTLPGGTYGAYNGTSMATPHVAGAAALILSKHPTWTNAQVRDRLESTATYLGPSFYYGKGLINVQAAAQ

SEQ ID NO: 70210 - protein, 275 aa, Bacillus pumilus
AQSVPYGISQIKAPALHSQGYTGSNVKVAVIDSGIDSSHPDLNVRGGASFVPSETNPYQDGSSHGTHVAGTIAALNNSIGVLGVAPSSALYAVKVLDSTGSGQYSWIINGIEWAISNNMDVINMSLGGPTGSTALKTVVDKAVSSGIVVAAAAGNEGSSGSTSTVGYPAKYPSTIAVGAVNSANQRASFSSAGSELDVMAPGVSIQSTLPGGTYGAYNGTSMATPHVAGAAALILSKHPTWTNAQVRDRLESTATYLGSSFYYGKGLINVQAAAQ

SEQ ID NO: 70211 - protein, 275 aa, Bacillus subtilis
AQSVPYGISQIKAPALHSQGYTGSNVKVAVIDSGIDSSHPDLNVRGGASFVPSETNPYQDGSSHGTHVAGTIAALDNSIGVLGVAPSASLYAVKVLDSTGSGQYSWIINGIEWAISNNMDVINISLGGPTGSTALKTVVDKAVSSGIVVAAAAGNEGSSGSTSTVGYPAKYPSTIAVGAVNSSNQRASFSSAGSELDVMAPGVSIQSTLPGGTYGAYNGTSMATPHVAGAAALILSKHPTWTNAQVRDRLESTATYLGNSFYYGKGLINVQAAAQ

SEQ ID NO: 70212 - protein, 275 aa, Bacillus amyloliquefaciens
AQSVPYGVSQIKAPALHSQGYTGSNVKVAVIDSGIDSSHPDLKVAGGASMVPSETNTFQDNNSHGTHVAGTVAALNNSIGVLGVAPSASLYAVKVLGADGSGQYSWIINGIEWAIANNMDVINMSLGGPSGSAALKAAVDKAVASGVVVVAAAGNEGTSGSSSTVGYPGKYPSVIAVGAVDSSNQRASFSSVGPELDVMAPGVSIQSTLPGNKYGAYNGTSMASPHVAGAAALILSKHPNWTNTQVRSSLENTTTKLGDSFYYGKGLINVQAAAQ

SEQ ID NO: 70213 - protein, 275 aa, Bacillus subtilis
AQSVPYGISQIKAPALHSQGYTGSNVKVAVIDSGIDSSHPDLNVRGGASFVPSETNCYQDGSSHGTHVAGTIAALNNSIGVLGVAPSASLYCVKVLDSTGSGQYSWIINGIEWAISNNMDVINMSLGGPTGSTALKTVVDKAVSSGIVVAAAAGNEGSSGSTSTVGYPAKYPSTIAVGAVNSSNQRASFSSVGSELDVMAPGVSIQSTLPGGTYGAYNGTSMATPHVAGAAALILSKHPTWTNAQVRDRLESTATYLGNSFYYGKGLINVQAAAQ

SEQ ID NO: 70214 - protein, 275 aa, Bacillus subtilis
AQSVPYGISQIKAPALHSQGYTGSNVKVAVIDSGIDSSHPDLNVRGGASFVPSETNPYQDGSSHGTHVTGTIAALNNSIGVLGVAPSASLYAVKVLDSTGSGQYSWIINGIEWAISNNMDVINMSLGGPTGSTALKTVVDKAVSSGIVVAAAAGNEGSSGSTSTVGYPAKYPSTIAVGAVNSSNQRASFSSVGSELDVMAPGVSIQSTLPGGTYGAYNGTSMATPHVAGAAALILSKHPTWTNAQVRDRLESTATYLGNSFYYGKGLINVQAAAQ

SEQ ID NO: 70215 - protein, 274 aa, Bacillus sp.
QTVPWGIPHIKADKAHAAGVTGSGVKVAILDTGIDANHADLNVKGGASFVSGEPNALQDGNGHGTHVAGTVAALDNSIGVLGVAPSVSLYAVKVLGASGSGSVSSIAQGLEWAGNNGMHVANLSLGSPSPSATLEQAVNSATSRGVLVVAAAGNSGTSGNRNTMDYPARYSSVIAVGAVSSNNTRASFSSVGSELEVMAPGVNILSTYPGSTYATLNGTSMATPHVAGAAALIKAKYPSMTNVQIRNRLKNTATNLGDPFFYGKGVINVESALQ

SEQ ID NO: 70216 - protein, 275 aa, Bacillus subtilis
AQSVPYGISQIKAPALHSQGYTGSNVKVAVIDSGIDSSHPDLNVRGGASFVPSETNPYQDGSSHGAHVAGTIAALNNSIGVLGVAPSASLYAVKVLDSTGSGQYSWIINGIEWAIPNNMDVINMSLGGPTGSTALKTVVDKAVSSGIVVAAAAGNEGSSGSTSTVGYPAKYPSTIAVGAVNSSNQRASFSSVGSELDVMAPGVSIQSTLPGGTYGAYNGTSMATPHVAGAAALILSKHPTWTNAQVRDRLESTATYLGNSFYYGKGLINVQAAAQ

SEQ ID NO: 70217 - protein, 275 aa, Bacillus subtilis
AQSVPYGISQIKAPALHSQGYTGSNVKVAVIDSGIDSSHPDLNVRGGASFVPSETNPYQNGSSHGTHVAGTIAALNNSIGVLGVAPSASLYAVKVLDSTGSGQYSWIINGIEWAISNNMDVINMSLGGPTGSTALKTVVDKAVSSGIVVVAAAGNEGSSGSTSTVGYPAKYPSTIAVGAVNSSNQRASFSSAGSELDVMAPGVSIQSTLPGGTYGAYNGTSMATPHVAGAAALILSKHPTWTNAQVRDRLESTATYLGNSFYYGKGLINVQAAAQ

SEQ ID NO: 70218 - protein, 275 aa, Bacillus subtilis
AQSVPYGISQIKAPALHSQGYTGSNVKVAVIDSGIDSSHPDLNVRGGASFVPSETNPYQDGSSHGTHVAGTIAALNNNIGVLGVAPSASLYAVKVLDSTGSGQYSWIINGIEWAISNNMDVINMSLGGPTGSTALKTVVDKAVSSGIVVAAAAGNEGSSGSTSTVGYPAKYPSTIAVGAVNSSNQRASFSSAGSELDVMAPGVSIQSTLPGGTYGAYNGTSMATPHVAGAAALILSKHPTWTNAQVRDRLESTATYLGPSFYYGKGLINVQAAAQ

SEQ ID NO: 70219 - protein, 275 aa, Bacillus subtilis
AQSVPYGISQIKAPALHSQGYTGSNVKVAVIDSGIDSSHPDLNVRGGASFVPSETNPYQDGSSHGTHVAGTIAALDNNIGVLGVAPSASLYAVKVLDSTGSGQYSWIINGIEWAISNNMDVINMSLGGPTGSTALKTVVDKAVSSGIVVAAAAGNEGSSGSTSTVQYPAKYPSTIAVGAVNSSNQRASFSSAGSELDVMAPGVSIQSTLPGGTYGAYNGTSMATPHVAGAAALILSKHPTWTNAQVRDRLESTATYLGPSFYYGKGLINVQAAAQ

SEQ ID NO: 70220 - protein, 275 aa, Bacillus subtilis
AQVVPYGISQIKAPALHSQGYTGSNVKVAVIDSGIDSSHPDLNVRGGASFVPSETNPYQDGSSHGTHVAGTIAALDNSIGVLGVAPSASLYAVKVLDSTGSGQYSWIINGIEWAISNNMDVINMSLGGPTGSTALKTVVDKAVSSGIVVAAAAGNEGSSGSTSTVGYPAKYPSTIAVGAVNSSNQRASFSSAGSELDVMAPGVSIQSTLPGGTYGAYSGTSMATPHVAGAAALILSKHPTWTNAQVRDRLESTATYLGNSFYYGKGLINVQAAAQ

SEQ ID NO: 70221 - protein, 275 aa, Bacillus subtilis
AQSVPYGISQIKAPALHSQGYTGSNVKVAVIDSGIDSSHPDLNVRGGASFVPSETNPYQDGSSHGTHVAGTIAALDNSIGVLGVAPSASLYAVKVLDSTGSGQYSWIINGIEWAISNNMDVINMSLGGPTGSTALKTVVDKAVSSGIVVAAAAGNEGSSGSTSTVQYPAKYPSTIAVGAVNSSNQRASFSSAGSELDVMAPGVSIQSTLPGGTYGAYNGTSMATPHVAGAAALILSKHPTWTNAQVRDRLESTATYLGPSFYYGKGLINVQAAAQ

SEQ ID NO: 70222 - protein, 275 aa, Bacillus subtilis
AQSVPYGIEQIKAPALHSQGYTGSNVKVAVIDSGIDSSHPDLNVRGGASFVPSETNPYQDGSSHGTHVAGTIAALNNSIGVLGVAPSASLYAVKVLDSTGSGQYSWIINGIEWAISNNMDVINMSLGGPTGSTALKTVVDKAVSSGIVVAAAAGNEGSSGSTSTVGYPAKYPSTIAVGAVNSSNQRASFSSAGSELDVMAPGVSIQSTLPGGTYGAYNGTSMATPHVAGAAALILSKHPTWTNAQVRDRLESTATYLGNSFYYGKGLINVQAAAQ

SEQ ID NO: 70223 - protein, 275 aa, Bacillus subtilis
AQSVPYGISQIKAPALHSQGYTGSNVKVAVIDSGIDSSHPDLNVRGGASFVPSETNPYQDGSSHGTHVAGTIAALDNNIGVLGVAPSASLYAVKVLDSTGSGQYSWIINGIEWAISNNMDVINMSLGGPTGSTALKTVVDKAVSSGIVVAAAAGNEGSSGSTSTVQYPAKYPSTIAVGAVNSSNQRASFSSAGSELDVMAPGVSIQSTLPGGTYGAYNGTSMATPHVAGAAALILSKHPTWTNAQVRDRLESTATYLGNSFYYGKGLINVQAAAQ

SEQ ID NO: 70224 - protein, 274 aa, Bacillus sp.
QTVPWGIPHIKADKAHAAGVTGSGVKVAILDTGIDANHADLNVKGGASFVSGEPNALQDGNGHGTHVAGTVAALDNSIGVLGVAPNAELYAVKVLGASGSGSVSSIAQGLEWAGNNGMHVANLSLGSPSPSVTLEQAVNSATSRGVLVVAAAGNSGTSGNRNTMDYPARYSSVIAVGAVSSNNTRASFSSVGSELEVMAPGVNILSTYPGSTYATLNGTSMATPHVAGAAALIKAKYPSMTNVQIRNRLSSTATYLGDPFFYGKGVINVESALQ

SEQ ID NO: 70225 - protein, 275 aa, Bacillus subtilis
AQSVPYGISQIKAPALHSQGYTGSNVKVAVIDSGIDSSHPDLNVRGGASFVPSETNPYQDGSSHGTHVAGTIAALDNSIGVLGVAPSASLYAVKVLDSTGSGQYSWIINGIEWAISNNMDVINMSLGGPTGSTALKTVVDKAVSSGIVVAAAAGNEGSSGSTSTVGYPAKYPSTIAVGAVNSSNQRASFSSAGSELDVMAPGVSIQSTLPGGTYGAYSGTSMATPHVAGAAALILSKHPTWTNAQVRDRLESTATYLGPSFYYGKGLINVQAAAQ

SEQ ID NO: 70226 - protein, 275 aa, Bacillus subtilis
AQVVPYGIEQIKAPALHSQGYTGSNVKVAVIDSGIDSSHPDLNVRGGASFVPSETNPYQDGSSHGTHVAGTIAALNNNIGVLGVAPSASLYAVKVLDSTGSGQYSWIINGIEWAISNNMDVINMSLGGPTGSTALKTVVDKAVSSGIVVAAAAGNEGSSGSTSTVGYPAKYPSTIAVGAVNSSNQRASFSSAGSELDVMAPGVSIQSTLPGGTYGAYNGTSMATPHVAGAAALILSKHPTWTNAQVRDRLESTATYLGNSFYYGKGLINVQAAAQ

SEQ ID NO: 70227 - protein, 275 aa, Bacillus subtilis
AQVVPYGISQIKAPALHSQGYTGSNVKVAVIDSGIDSSHPDLNVRGGASFVPSETNPYQDGSSHGTHVAGTIAALNNNIGVLGVAPSASLYAVKVLDSTGSGQYSWIINGIEWAISNNMDVINMSLGGPTGSTALKTVVDKAVSSGIVVAAAAGNEGSSGSTSTVGYPAKYPSTIAVGAVNSSNQRASFSSAGSELDVMAPGVSIQSTLPGGTYGAYNGTSMATPHVAGAAALILSKHPTWTNAQVRDRLESTATYLGPSFYYGKGLINVQAAAQ

SEQ ID NO: 70228 - protein, 275 aa, Bacillus subtilis
AQSVPYGISQIKAPALHSQGYTGSNVKVAVIDSGIDSSHPDLNVRGGASFVPSETNPYQDGSSHGTHVAGTIAALDNSIGVLGVAPSASLYAVKVLDSTGSGQYSWIINGIEWAISNNMDVINMSLGGPTGSTALKTVVDKAVSSGIVVAAAAGNEGSSGSTSTVGYPAKYPSTIAVGAVNSSNQRASFSSAGSELDVMAPGVSIQSTLPGGTYGAYSGTSMATPHVAGAAALILSKHPTWTNAQVRDRLESTATYLGNSFYYGKGLINVQAAAQ

SEQ ID NO: 70229 - protein, 275 aa, Bacillus subtilis
AQSVPYGISQIKAPALHSQGYTGSNVKVAVIDSGIDSSHPDLNVRGGASFVPSETNPYEDGSSHGTHVAGTIAALNNSIGVLGVAPSASLYAVKVLDSTGSGQYSWIINGIEWAISNNMDVINMSLGGPTGSTALKTVVDKAVSSGIVVAAAAGNEGSSGSTSTVGYPAKYPSTIAVGAVNSSNQRASFSSVGSELDVMAPGVSIQSTLPGGTYGAKDGTSMATPHVAGAAALILSKHPTWTNAQVRDRLESTATYLGNSFYYGKGLINVQAAAQ

SEQ ID NO: 70230 - protein, 275 aa, Bacillus subtilis
AQSVPYGISQIKAPALHSQGYTGSNVKVAVIDSGIDSSHPDLNVRGGASFVPSETNPYQDGSSHGTHVAGTIAALNNSIGVLGVAPSASLYAVKVLDSTGSGQYSWIINGIEWAISNNMDVINMSLGGPTGSTALKTVVDKAVSSGIVVVAAAGNEGSSGSTSTVGYPAKYPSTIAVGAVNSSNQRASFSSAGSELDVMAPGVSIQSTLPGGTYGAYSGTSMATPHVAGAAALILSKHPTWTNAQVRDRLESTATYLGNSFYYGKGLINVQAAAQ

SEQ ID NO: 70231 - protein, 275 aa, Bacillus subtilis
AQVVPYGISQIKAPALHSQGYTGSNVKVAVIDSGIDSSHPDLNVRGGASFVPSETNPYQDGSSHGTHVAGTIAALDNNIGVLGVAPSASLYAVKVLDSTGSGQYSWIINGIEWAISNNMDVINMSLGSPTGSTALKTVVDKAVSSGIVVAAAAGNEGSSGSTSTVGYPAKYPSTIAVGAVNSSNQRASFSSAGSELDVMAPGVSIQSTLPGGTYGAYNGTSMATPHVAGAAALILSKHPTWTNAQVRDRLESTATYLGNSFYYGKGLINVQAAAQ

SEQ ID NO: 70232 - protein, 275 aa, Bacillus subtilis
AQSVPYGIEQIKAPALHSQGYTGSNVKVAVIDSGIDSSHPDLNVRGGASFVPSETNPYQDGSSHGTHVAGTIAALNNNIGVLGVAPSASLYAVKVLDSTGSGQYSWIINGIEWAISNNMDVINMSLGGPTGSTALKTVVDKAVSSGIVVAAAAGNEGSSGSTSTVGYPAKYPSTIAVGAVNSSNQRASFSSAGSELDVMAPGVSIQSTLPGGTYGAYNGTSMATPHVAGAAALILSKHPTWTNAQVRDRLESTATYLGNSFYYGKGLINVQAAAQ

SEQ ID NO: 70233 - protein, 275 aa, Bacillus subtilis
AQVVPYGISQIKAPALHSQGYTGSNVKVAVIDSGIDSSHPDLNVRGGASFVPSETNPYQDGSSHGTHVAGTIAALNNNIGVLGVAPSASLYAVKVLDSTGSGQYSWIINGIEWAISNNMDVINMSLGGPTGSTALKTVVDKAVSSGIVVAAAAGNEGSSGSTSTVGYPAKYPSTIAVGAVNSSNQRASFSSAGSELDVMAPGVSIQSTLPGGTYGAYNGTSMATPHVAGAAALILSKHPTWTNAQVRDRLESTATYLGNSFYYGKGLINVQAAAQ

SEQ ID NO: 70234 - protein, 275 aa, Bacillus subtilis
AQVVPYGISQIKAPALHSQGYTGSNVKVAVIDSGIDSSHPDLNVRGGASFVPSETNPYQDGSSHGTHVAGTIAALNNSIGVLGVAPSASLYAVKVLDSTGSGQYSWIINGIEWAISNNMDVINMSLGGPTGSTALKTVVDKAVSSGIVVAAAAGNEGSSGSTSTVGYPAKYPSTIAVGAVNSSNQRASFSSAGSELDVMAPGVSIQSTLPGGTYGAYNGTSMATPHVAGAAALILSKHPTWTNAQVRDRLESTATYLGNSFYYGKGLINVQAAAQ

SEQ ID NO: 70235 - protein, 275 aa, Bacillus subtilis
AQSVPYGISQIKAPALHSQGYTGSNVKVAVIDSGIDSSHPDLNVRGGASFVPSETNPYQDGSSHGTHVAGTIAALDNNIGVLGVAPSASLYAVKVLDSTGSGQYSWIINGIEWAISNNMDVINMSLGSPTGSTALKTVVDKAVSSGIVVAAAAGNEGSSGSTSTVGYPAKYPSTIAVGAVNSSNQRASFSSAGSELDVMAPGVSIQSTLPGGTYGAYNGTSMATPHVAGAAALILSKHPTWTNAQVRDRLESTATYLGPSFYYGKGLINVQAAAQ

SEQ ID NO: 70236 - protein, 275 aa, Bacillus subtilis
AQSVPYGISQIKAPALHSQGYTGSNVKVAVIDSGIDSSHPDLNVRGGASFVPSETNPYQDGSSHGTHVAGTIAALNNSIGVLGVAPSASLYAVKVLGSTGSGRYSWIINGIEWAISNNMDVINMSLGGPTGSTALKTVVDKAVSSGIVVVAAAGNGGSSGSTSTVGYPAKYPSTIAVGAVNSSNQRASFSSAGSELDVMAPGVSIQSTLPGGTYGAYNGTSMATPHVAGAAALILSKHPTWTNAQVRDRLESTAAYLGNSFYYGKGLINVQAAAQ

SEQ ID NO: 70237 - protein, 273 aa, Bacillus sp.
AQTVPWGIPHIKADKAHAAGVTGSGVKVAILDTGIDANHADLNVKGGASFVFGEPNALQDGNGHGTHVAGTVAALDNTTGVLGVAYNADLYAVKVLSASGSGTLSGIAQGIEWSISNRMNVINMSLGDFYGSTALQQACNNAYNRGIVVIAAAGNSGSSGNRNTMDYPARYSSVIAVGAVSSNNTRASFSSVGSELEVMAPGVNILSTTPGNNYASRNGTSMAAPHVAGAAALIKAKYPSMTNVQIRNRLKNTATNLGDPFFYGKGVINVESA

SEQ ID NO: 70238 - protein, 274 aa, Bacillus subtilis
AQSVPYGISQIKAPALHSQGYTGSNVKVAVIDSGIDSSHPDLNVRGGASFVPSETNPYQDGSSHGTHVAGTIAALNNSIGVLGVAPSASLYAVKVLDSTGSGQYSWIINGIEWAISNNMDVINMSLGGPSGSTALKTVVDKAVSSGIVVAAAAGNEGSSGSSSTVGYPAKYPSTIAVGAVNSSNQRASFSSAGSELDVMAPGVSIQSTLPGGTYGAYNGTSMATPHVAGAAALILSKHPTWTNAQVRDRLESTATYLGNSFYYGKGLINVQAAA

SEQ ID NO: 70239 - protein, 383 aa, Unidentified
MKRKVGKLMVGLVCVTALVTVTDSASAAEEKVKYLIGFEEEAELEAFTEEIDQVGVFSVEEQSVAEDTLDIDVDIIDEYDYIDVLAVELDPEDVDALSEEAGISFIEEDIELSIQQTVPWGITRVQAPAVHNRGITGSGVRVAILDSGISAHSDLNIRGGASFVPGEPTTADLNGHGTHVAGTVAALNNSIGVIGVAPNAELYAVKVLGANGSGSVSGIAQGLEWAATNNMHIANMSLGSDFPSSTLERAVNYATSRDVLVIAATGNNGSGSVGYPARYANAMAVGATDQNNRRANFSQYGTGIDIVAPGVNVQSTYPGNRYVSMNGTSMATPHVAGAAALVKQRYPSWNATQIRNHLKNTATNLGNSSQFGSGLVNAEAATR

SEQ ID NO: 70240 - protein, 379 aa, Unidentified
VGKLVVGLVCVTALVTVTDSASAAEEKVKYLIGFEEEAELEAFTEEIDQVGVFSVEEQSVAEDTLDIDVDIIDEYDYIDVLAVELDPEDVDALSEEAGISFIEEDIELSIQQTVPWGITRVQAPAVHNRGVTGSGVRVAILDSGISTHSDLTIRGGASFVPGEPTTADLNGHGTHVAGTVAALNNSIGVIGVAPSADLYAVKVLGANGRGSVSGIAQGLEWAAANNMHIANMSLGSDAPSTTLERAVNYATSQGVLVIAATGNNGSGSVGYPARYANAMAVGATDQNNRRANFSQYGTGIDIVAPGVNVQSTYPGNRYVSMNGTSMATPHVAGAAALVKQRYPSWNATQIRNHLKNTATNLGNSSQFGSGLVNAEAATR

SEQ ID NO: 70241 - protein, 379 aa, Unidentified
VGKLVVGLVCVTALVTVTDSASAAEEKVKYLIGFEEEAELEAFTEEIDQVGVFSVEEQSVAEDTLDIDVDIIDEYDYIDVLAVELDPEDVDALSEEAGISFIEEDIELSIQQTVPWGITRVQAPAVHNRGVTGSGVRVAILDSGISTHSDLTIRGGASFVPGEPTTADLNGHGTHVAGTVAALNNSIGVIGVAPSADLYAVKVLGANGRGSVSGIAQGLEWAAANNMHIANMSLGSDAPSTTLERAVNYATSQGVLVIAATGNNGSGSVGYPARYANAMAVGATDQNNRRANFSQYGSGIDIVAPGVNVQSTYPGNRYVSMNGTSMATPHVAGAAALVKQRYPSWNATQIRNHLKNTATNLGNSSQFGSGLVNAEAATR

SEQ ID NO: 70242 - protein, 379 aa, Unidentified
VGKLVVGLVCVTALVTVTDSASAAEEKVKYLIGFEEEAELEAFTEEVDQVGVFSVEEQSLVEDTLDIDVDIIDEYDYIDVLSVELDPEDVDALSEEEGISYIEEDFELSIQQTVPWGITRVQAPTVHNRGITGSGVKVAILDTGIAQHSDLTIRGGASFVPGESTTADLNGHGTHVAGTVAALNNSIGVIGVAPSADLYAVKVLGANGRGSVSGIAQGLEWAATNNMHIANMSLGSDAPSTTLERAVNYATSRGVLVIAATGNNGTGSIGYPARYANAMAVGATDQNNRRASFSQYGTGIDIVAPGVGIQSTYLNNSYASMPGTSMATPHVAGVAALVKQKNPSWNATQIRNHLKNTATNLGNSSQFGSGLVNADAATR

SEQ ID NO: 70243 - protein, 379 aa, Unidentified
VGKLVVGLVCVTALVTVTDSASAAEEKVKYLIGFEEEAELEAFTEEIDQVGVFSVEEQSVAEDTLDIDVDIIDEYDYIDVLAVELDPEDVDALSEEAGISFIEEDIELSIQQTVPWGITRVQAPAVHNRGITGSGVRVAILDSGISAHSDLNIRGGASFVPGEPTTADLNGHGTHVAGTVAALNNSIGVIGVAPNADLYAVKVLGANGSGSVSGIAQGLEWAATNNMHIANMSLGSDFPSSTLERAVNYATSRDVLVIAATGNNGSGSVGYPARYANAMAVGATDQNNRRANFSQYGTGIDIVAPGVNVQSTYPGNRYVSMNGTSMATPHVAGAAALVKQRYPSWNATQIRNHLKNTATNLGNSSQFGSGLVNAEAATR

SEQ ID NO: 70244 - protein, 275 aa, Bacillus amyloliquefaciens
AQSVPYGVSQIKAPALHSQGYTGSNVKVAVIDSGIDSSHPDLKVAGGASMVPSETNPFQDNNSHGTHVAGTVAALNNSIGVLGVAPSTSLYAVKVLGADGSGQYSWIIGGIEWAITNNMDVINMSLGGPSGSAALKAAVDKAVASGVVVVAAAGNEGSSGSSSTVGYPGKYPSVIAVGAVDSSNQRASFSSVGPELDVMAPGVSIQSTLPGNKYGAYNGTSMASPHVAGAAALILSKHPNWTVTQVRSSLENTTTRLGDSFYYGKGLINVQAAAQ

SEQ ID NO: 70245 - protein, 275 aa, Bacillus amyloliquefaciens
AQSVPYGVSQIKAPALHSQGYTGSNVKVAVIDSGIDSSHPDLKVAGGASMVPSETNPFQDNNSHGTHVAGTVAALNNSIGVLGVAPSASLYAVKVLGGSGSGQYSWIINGIEWAIANNMDVINMSLGGPSGSAALKAAVDKAVASGVVVVAAAGNEGTSGSSSTVGYPGKYPSVIAVGAVDSSNQRASFSSVGPELDVMAPGVSIQSTLPGNKYGALNGTSMASPHVAGAAALILSKHPNWTNTQVRSSLENTTTKLGDSFYYGKGLINVQAAAQ

SEQ ID NO: 70246 - protein, 275 aa, Bacillus sp.
AQTVPWGIPHIKADKAHAAGVTGSGVKVAILDTGIDANHADLNVKGGASFVSGEPNALQDGNGHGTHVAGTVAALDNTTGVLGVAYNADLYAVKVLSASGSGTLSGIAQGIEWSISNRMNVINMSLGDTFGSTALQQACNNAYNRGIVVIAAAGNSGSSGNRNTMDYPARYSSVIAVGAVSSNNTRASFSSVGSELEVMAPGVNILSTTPGNNYASFNGTSMAAPHVAGAAALIKAKYPSMTNVQIRNRLKNTATNLGDPFFYGKGVINVESALQ

SEQ ID NO: 70247 - protein, 275 aa, Bacillus amyloliquefaciens
AQSVPYGVSQIKAPALHSQGYTGCNVKVAVIDSGIDSSHPDLKVAGGASMVPSETNPFQDNNSAGTHVAGTVAALNNSIGVLGVAPSASLYAVKVLGADGSGQYSWIINGIEWAIANNMDVINMSLGGPSGSAALKAAVDKAVASGVVVVAAAGNSGTSGSSSTVGYPAKYPSVIAVGAVDSSNQRASFSSVGPELDVMAPGVSIQSTLPGNKYGALNGTSMASPHVAGAAALILSKHPNWTNTQVRSSLENTTTKLGDSFYYGKGLINVQAAAQ

SEQ ID NO: 70248 - protein, 274 aa, Bacillus amyloliquefaciens
AQSVPYGVSQIKAPALHSQGYTGSNVKVAVIDSGIDSSHPDLKVAGGASMVPGESAFQDNNSHGTHVAGTVAALNNSIGVLGVAPSASLYAVKVLGTDGSGQYSWIINGIEWAIANNMDVINMSLGGPSGSAALKAAVDKAVASGVVVVAAAGNEGTSGSSSTVGYPGKYPSVIAVGAVDSSNQRASFSSVGPELDVMAPGVSIQSTLPGNKYGALNGTSMASPHVAGAAALILSKHPNWTNTQVRSSLENTTTKLGDSFYYGKGLINVQAAAQ

SEQ ID NO: 70249 - protein, 275 aa, Bacillus sp.
AQTVPWGIPHIKADKAHAAGVTGSGVKVAILDTGIDANHADLNVKGGASFVSGEPNALQDGNGHGTHVAGTVAALDNTTGVLGVAYNADLYAVKVLSASGSGTLSGIAQGIEWSISNRMNVINMSLGNYMGSTALQQACNNAYNRGIVVIAAAGNSGSSGNRNTMDYPARYSSVIAVGAVSSNNTRASFSSVGSELEVMAPGVNILSTTPGNNYASFNGTSMAAPHVAGAAALIKAKYPSMTNVQIRNRLKNTATNLGDPFFYGKGVINVESALQ

SEQ ID NO: 70250 - protein, 275 aa, Bacillus sp.
AQTVPWGIPHIKADKAHAAGVTGSGVKVAILDTGIDANHADLNVKGGASFVSGEPNALQDGNGHGTHVAGTVAALDNTTGVLGVAYNADLYAVKVLSASGSGTLSGIAQGIEWSISNRMNVINMSLGDNMGSTALQQACNNAYNRGIVVIAAAGNSGSSGNRNTMDYPARYSSVIAVGAVSSNNTRASFSSVGSELEVMAPGVNILSTTPGNNYASFNGTSMAAPHVAGAAALIKAKYPSMTNVQIRNRLKNTATNLGDPFFYGKGVINVESALQ

SEQ ID NO: 70251 - protein, 275 aa, Bacillus amyloliquefaciens
AQSVPYGVSQIKAPALHSQGYTGSNVKVAVIDSGIDSSHPDLKVAGGASMVPSETNPFQDNNSHGTHVAGTVAALNNSIGVLGVAPSASLYAVKVLGLSGSGQYSWIINGIEWAIANNMDVINMSLGGPSGSAALKAAVDKAVASGVVVVAAAGNEGTSGSSSTVGYPGKYPSVIAVGAVDSSNQRASFSSVGPELDVMAPGVSIQSTLPGNKYGALNGTSMASPHVAGAAALILSKHPNWTNTQVRSSLENTTTKLGDSFYYGKGLINVQAAAQ

SEQ ID NO: 70252 - protein, 275 aa, Bacillus amyloliquefaciens
AQSVPYGVSQIKAPALHSQGYTGSNVKVAVIDSGIDSSHPDLKVAGGASMVPSETNPFQDNNSHGTHVAGTVAALNNSIGVLGVAPSASLYAVKVLCVSGSGQYSWIINGIEWAIANNMDVINMSLGGPSGSAALKAAVDKAVASGVVVVAAAGNEGTSGSSSTVGYPGKYPSVIAVGAVDSSNQRASFSSVGPELDVMAPGVSIQSTLPGNKYGALNGTSMASPHVAGAAALILSKHPNWTNTQVRSSLENTTTKLGDSFYYGKGLINVQAAAQ

SEQ ID NO: 70253 - protein, 275 aa, Bacillus amyloliquefaciens
AQSVPYGVSQIKAPALHSQGYTGSNVKVAVIDSGIDSSHPDLKVAGGASMVPSETNPFQDNNSHGTHVAGTVAALNNSIGVLGVAPSASLYAVKVLGISGSGQYSWIINGIEWAIANNMDVINMSLGGPSGSAALKAAVDKAVASGVVVVAAAGNEGTSGSSSTVGYPGKYPSVIAVGAVDSSNQRASFSSVGPELDVMAPGVSIQSTLPGNKYGALNGTSMASPHVAGAAALILSKHPNWTNTQVRSSLENTTTKLGDSFYYGKGLINVQAAAQ

SEQ ID NO: 70254 - protein, 275 aa, Bacillus sp.
AQTVPWGIPHIKADKAHAAGVTGSGVKVAILDTGIDANHADLNVKGGASFVFGEPNALQDGNGHGTHVAGTVAALDNTTGVLGVAYNADLYAVKVLSASGSGTLSGIAQGIEWSISNRMNVINMSLGDFYGSTALQQACNNAYNRGIVVIAAAGNSGSSGNRNTMDYPARYSSVIAVGAVSSNNTRASFSSVGSELEVMAPGVNILSTTPGNNYASRNGTSMAAPHVAGAAALIKAKYPSMTNVQIRNRLKNTATRLGDPFFYGKGVINVEKALQ

SEQ ID NO: 70255 - protein, 275 aa, Bacillus amyloliquefaciens
AQSVPYGVSQIKAPALHSQGYTGSNVKVAVIDSGIDSSHPDLKVAGGASMVPSETNPFQDNNSHGTHVAGTVAALNNSIGVLGVAPSASLYAVKVLNRRGSGQYSWIINGIEWAIANNMDVINMSLGGPSGSAALKAAVDKAVASGVVVVAAAGNEGTSGSSSTVGYPGKYPSVIAVGAVDSSNQRASFSSVGPELDVMAPGVSIQSTLPGNKYGALNGTSMASPHVAGAAALILSKHPNWTNTQVRSSLENTTTKLGDSFYYGKGLINVQAAAQ

SEQ ID NO: 70256 - protein, 275 aa, Bacillus sp.
AQTVPWGIPHIKADKAHAAGVTGSGVKVAILDTGIDANHADLNVKGGASFVSGEPNALQDGNGHGTHVAGTVAALDNTTGVLGVAYNADLYAVKVLSASGSGTLSGIAQGIEWSISNRMNVINMSLGHQWGSTALQQACNNAYNRGIVVIAAAGNSGSSGNRNTMDYPARYSSVIAVGAVSSNNTRASFSSVGSELEVMAPGVNILSTTPGNNYASFNGTSMAAPHVAGAAALIKAKYPSMTNVQIRNRLKNTATNLGDPFFYGKGVINVESALQ

SEQ ID NO: 70257 - protein, 274 aa, Bacillus amyloliquefaciens
AQSVPYGVSQIKAPALHSQGYTGSNVKVAVIDSGIDSSHPDLKVAGGASMVPGEPPFQDNNGHGTHVAGTVAALNNSIGVLGVAPSASLYAVKVLGADGSGQYSWIINGIEWAIANNMDVINMSLGGPSGSAALKAAVDKAVASSVVVVAAAGNEGTSGSSSTVGYPGKYPSVIAVGAVDSSNQRASFSSVGPELDVMAPGVSIQSTLPGNKYGALNGTSMASPHVAGAAALILSKHPNWTNTQVRSSLENTTTKLGDSFYYGKGLINVQAAAQ

SEQ ID NO: 70258 - protein, 275 aa, Bacillus amyloliquefaciens
AQSVPYGVSQIKAPALHSQGYTGSNVKVAVIDTGIDSSHPDLKVAGGASMVPSETNPFQDNNSHGTHVAGTVAALDNSIGVLGVAPSASLYAVKVLGADGSGQYSWIIGGIEWAIANNMDVINMSLGGPSGSAALKAAVDKAVASGVVVVAAAGNEGTSGSSSTVGYPGKYPSVIAVGAVDSSNQRASFSSVGPELDVMAPGVSIQSTLPGNKYGAYSGTSMASPHVAGAAALILSKHPNWTVTQVRNSLENTTTRLGDSFYYGKGLINVQAAAQ

SEQ ID NO: 70259 - protein, 275 aa, Synthetic construct
AQVVPWGIPHIKADKAHASGVTGSGVKVAVLDTGIDANHADLNVKGGASFVSGEPNALQDGNGHGTHVAGTVAALNNTTGVLGVAYNAFLYAVKVLGASGSGTLSGIAQGIEWSIANDMDVINMSLGSSTGSTALQQACNNAYASGIVVVAAAGNSGSNGKRNTMGYPARYSSVIAVGAVDSSNNRASFSSVGSELEVMAPGVSILSTTPGNNYESFNGTSMASPHVAGAAALIKAKYPSMTNVQIRNKLKNTATNLGDAFYYGHGVINVEKALQ

SEQ ID NO: 70260 - protein, 275 aa, Bacillus sp.
AQTVPWGIPHIKADKAHAAGVTGSGVKVAILDTGIDANHADLNVKGGASFVSDEPNALQDGNGHGTHVAGTVAALNNTTGVLGVAYNADLYAVKVLSASGSGTLSGIAQGIEWSISNGMNVINMSLGGSSGSTALQQACNNAYNRGIVVIAAAGNSGSSGNRNTMDYPARYSSVIAVGAVSSNNTRASFSSVGSELEVMAPGVNILSTTPGNNYASFNGTSMAAPHVAGAAALIKAKYPSMTNVQIRERLKNTATNLGDPFFYGKGVINVESALQ

SEQ ID NO: 70261 - protein, 275 aa, Bacillus sp.
AQTVPWGIPHIKADKAHAAGVTGSGVKVAILDTGIDANHADLNVKGGASFVSGEPNALQDGNGHGTHVAGTVAALDNTTGVLGVAYNADLYAVKVLSASGSGTLSGIAQGIEWSISNRMNVINMSLGSVLGSTALQQACNNAYNRGIVVIAAAGNSGSSGNRNTMDYPARYSSVIAVGAVSSNNTRASFSSVGSELEVMAPGVNILSTTPGNNYASFNGTSMAAPHVAGAAALIKAKYPSMTNVQIRNRLKNTATNLGDPFFYGKGVINVESALQ

SEQ ID NO: 70262 - protein, 275 aa, Bacillus sp.
AQTVPWGIPHIKADKAHAAGVTGSGVKVAILDTGIDANHADLNVKGGASFVSGEPNALQDGNGHGTHVAGTVAALNNTTGVLGVAYNADLYAVKVLSASGSGTLSGIAQGIEWSISNGMNVINMSLGVMHGSTALQQACNNAYNRGIVVIAAAGNSGSSGNRNTMDYPARYSSVIAVGAVSSNNTRASFSSVGSELEVMAPGVNILSTTPGNNYASFNGTSMAAPHVAGAAALIKAKYPSMTNVQIRNRLKNTATNLGDPFFYGKGVINVEKALQ

SEQ ID NO: 70263 - protein, 275 aa, Bacillus sp.
AQTVPWGIPHIKADKAHAAGVTGSGVKVAILDTGIDANHADLNVKGGASFVSGEPNALQDGNGHGTHVAGTVAALDNTTGVLGVAYNADLYAVKVLSASGSGTLSGIAQGIEWSISNRMNVINMSLGDYRGSTALQQACNNAYNRGIVVIAAAGNSGSSGNRNTMDYPARYSSVIAVGAVSSNNTRASFSSVGSELEVMAPGVNILSTTPGNNYASFNGTSMAAPHVAGAAALIKAKYPSMTNVQIRNRLKNTATNLGDPFFYGKGVINVESALQ

SEQ ID NO: 70264 - protein, 275 aa, Bacillus amyloliquefaciens
AQSVPYGVSQIKAPALHSQGYTGSNVKVAVIDSGIDSSHPDLKVAGGASMVPSETNPFQDNNGHGTHVAGTVAALDNSIGVLGVAPSASLYAVKVLGADGSGQYSWIINGIEWAIANNMDVINMSLGGPSGSAALKAAVDKAVASGVVVVAAAGNEGTSGSSSTVGYPGKYPSVIAVGAVDSSNQRASFSSVGPELDVMAPGVSIQSTLPGNKYGAYNGTSMASPHVAGAAALILSKHPNWTNTQVRSSLENTTTKLGDSFYYGKGLINVQAAAQ

SEQ ID NO: 70265 - protein, 275 aa, Bacillus amyloliquefaciens
AQSVPYGVSQIKAPALHSQGYTGSNVKVAVIDSGIDSSHPDLKVAGGASMVPSETNPFQDNNSHGTHVAGTVAALNNSIGVLGVAPSASLYAVKVLGSCGSGQYSWIINGIEWAIANNMDVINMSLGGPSGSAALKAAVDKAVASGVVVVAAAGNEGTSGSSSTVGYPGKYPSVIAVGAVDSSNQRASFSSVGPELDVMAPGVSIQSTLPGNKYGALNGTSMASPHVAGAAALILSKHPNWTNTQVRSSLENTTTKLGDSFYYGKGLINVQAAAQ

SEQ ID NO: 70266 - protein, 275 aa, Bacillus sp.
AQTVPWGIPHIKADKAHAAGVTGSGVKVAILDTGIDANHADLNVKGGASFVSGEPNALQDGNGHGTHVAGTVAALDNTTGVLGVAYNADLYAVKVLSASGSGTLSGIAQGIEWSISNRMNVINMSLGHNVGSTALQQACNNAYNRGIVVIAAAGNSGSSGNRNTMDYPARYSSVIAVGAVSSNNTRASFSSVGSELEVMAPGVNILSTTPGNNYASFNGTSMAAPHVAGAAALIKAKYPSMTNVQIRNRLKNTATNLGDPFFYGKGVINVESALQ

SEQ ID NO: 70267 - protein, 275 aa, Bacillus sp.
AQTVPWGIPHIKADKAHAAGVTGSGVKVAILDTGIDANHADLNVKGGASFVSGEPNALQDGNGHGTHVAGTVAALNNTTGVLGVAYNADLYAVKVLSASGSGTLSGIAQGIEWSISNGMNVINMSLGVMHGSTALQQACNNAYNRGIVVIAAAGNSGSSGNRNTMDYPARYSSVIAVGAVSSNNTRASFSSVGSELEVMAPGVNILSTTPGNNYASRNGTSMAAPHVAGAAALIKAKYPSMTNVQIRNRLKNTATNLGDPFFYGKGVINVESALQ

SEQ ID NO: 70268 - protein, 275 aa, Bacillus sp.
AQTVPWGIPHIKADKAHAAGVTGSGVKVAILDTGIDANHADLNVKGGASFVFGEPNALQDGNGHGTHVAGTVAALDNTTGVLGVAYNADLYAVKVLSASGSGTLSGIAQGIEWSISNRMNVINMSLGDFYGSTALQQACNNAYNRGIVVIAAAGNSGSSGNRNTMDYPARYSSVIAVGAVSSNNTRASFSSVGSELEVMAPGVNILSTTPGNNYASRNGTSMAAPHVAGAAALIKAKYPSMTNVQIRNRLKNTATNLGDPFFYGKGVINVESALQ

SEQ ID NO: 70269 - protein, 275 aa, Bacillus sp.
AQTVPWGIPHIKADKAHAAGVTGSGVKVAILDTGIDANHADLNVKGGASFVTGEPNALQDGNGHGTHVAGTVAALDNTTGVLGVAYNADLYAVKVLSASGSGTLSGIAQGIEWSISNRMNVINMSLGVMHGSTALQQACNNAYNRGIVVIAAAGNSGSSGNRNTMDYPARYSSVIAVGAVSSNNTRASFSSVGSELEVMAPGVNILSTTPGNNYASFNGTSMAAPHVAGAAALIKAKYPSMTNVQIRNRLKNTATELGDPFFYGKGVINVEKALQ

SEQ ID NO: 70270 - protein, 275 aa, Bacillus sp.
AQTVPWGIPHIKADKAHAAGVTGSGVKVAILDTGIDANHADLNVKGGASFVTGEPNALQDGNGHGTHVAGTVAALNNTTGVLGVAYNADLYAVKVLSASGSGTLSGIAQGIEWSISNGMNVINMSLGVMHGSTALQQACNNAYNRGIVVIAAAGNSGSSGNRNTMDYPARYSSVIAVGAVSSNNTRASFSSVGSELEVMAPGVNILSTTPGNNYASRNGTSMAAPHVAGAAALIKAKYPSMTNVQIRNRLKNTATELGDPFFYGKGVINVEKALQ

SEQ ID NO: 70271 - protein, 275 aa, Bacillus amyloliquefaciens
AQSVPYGVSQIKAPALHSQGYTGSNVKVAVIDSGIDSSHPDLKVAGGASMVPSETNPFQDNNSHGTHVAGTVAALNNSIGVLGVAPSASLYAVKVLRRSGSGQYSWIINGIEWAIANNMDVINMSLGGPSGSAALKAAVDKAVASGVVVVAAAGNEGTSGSSSTVGYPGKYPSVIAVGAVDSSNQRASFSSVGPELDVMAPGVSIQSTLPGNKYGALNGTSMASPHVAGAAALILSKHPNWTNTQVRSSLENTTTKLGDSFYYGKGLINVQAAAQ

SEQ ID NO: 70272 - protein, 275 aa, Bacillus amyloliquefaciens
AQSVPYGVSQIKAPALHSQGYTGSNVKVAVIDSGIDSSHPDLKVAGGASMVPSETNPFQDNNSHGTHVAGTVAALNNSIGVLGVAPSASLYAVKVLHSSGSGQYSWIINGIEWAIANNMDVINMSLGGPSGSAALKAAVDKAVASGVVVVAAAGNEGTSGSSSTVGYPGKYPSVIAVGAVDSSNQRASFSSVGPELDVMAPGVSIQSTLPGNKYGALNGTSMASPHVAGAAALILSEHPNWTNTQVRSSLENTTTKLGDSFYYGKGLINVQAAAQ

SEQ ID NO: 70273 - protein, 275 aa, Bacillus sp.
AQTVPWGIPHIKADKAHAAGVTGSGVKVAILDTGIDANHADLNVKGGASFVSGEPNALQDGNGHGTHVAGTVAALNNTTGVLGVAYNADLYAVKVLSASGSGTLSGIAQGIEWSISNGMNVINMSLGGSSGSTALQQACDNAYNRGIVLIAAAGNHGSSGNRNTMNYPARYSSVIAVGAVSSNNTRASFSSVGSELEVMAPGVNILSTTPGNNYASFNGTSMAAPHVAGAAALIKAKYPSMTNVQIRERLKNTATNLGDPFFYGKGVINVEQALQ

SEQ ID NO: 70274 - protein, 275 aa, Bacillus amyloliquefaciens
AQSVPYGVSQIKAPALHSQGYTGSNVKVAVIDSGIDSSHPDLKVAGGASMVPSETNPFQDNNSHGTHVAGTVAALNNSIGVLGVAPSASLYAVKVLRSVGSGQYSWIINGIEWAIANNMDVINMSLGGPSGSAALKAAVDKAVASGVVVVAAAGNEGTSGSSSTVGYPGKYPSVIAVGAVDSSNQRASFSSVGPELDVMAPGVSIQSTLPGNKYGALNGTSMASPHVAGAAALILSKHPNWTNTQVRSSLENTTTKLGDSFYYGKGLINVQAAAQ

SEQ ID NO: 70275 - protein, 275 aa, Bacillus amyloliquefaciens
AQSVPYGVSQIKAPALHSQGYTGSNVKVAVIDSGIDSSHPDLKVAGGASMVPSETNPFQDNNSHGTHVAGTVAALNNSIGVLGVAPSASLYAVKVLRSLGSGQYSWIINGIEWAIANNMDVINMSLGGPSGSAALKAAVDKAVASGVVVVAAAGNEGTSGSSSTVGYPGKYPSVIAVGAVDSSNQRASFSSVGPELDVMAPGVSIQSTLPGNKYGALNGTSMASPHVAGAAALILSKHPNWTNTQVRSSLENTTTKLGDSFYYGKGLINVQAAAQ

SEQ ID NO: 70276 - protein, 275 aa, Bacillus sp.
AQTVPWGIPHIKADKAHAAGVTGSGVKVAILDTGIDANHADLNVKGGASFVSGEPNALQDGNGHGTHVAGTVAALNNTTGVLGVAYNADLYAVKVLSASGSGTLSGIAQGIEWSISNGMNVINMSLGGSSGSTALQQACDNAYNRGIVLIAAAGNSGSDGNRNTMYYPARYSSVIAVGAVSSNNQRASFSSVGSELEVMAPGVNILSTTPGNNYASFNGTSMAAPHVAGAAALIKAKYPSMTNVQIRERLKNTATNLGDPFFYGKGVINVESALQ

SEQ ID NO: 70277 - protein, 275 aa, Bacillus amyloliquefaciens
AQSVPYGISQIKAPALHSQGYTGSNVKVAVIDSGIDSSHPDLKVAGGASMVPSETNPFQDNNSHGTHVAGTVAALNNSIGVLGVAPSASLYAVKVLGADGSGQYSWIINGIEWAIANNMDVINMSLGGPSGSAALKAAVDKAVASGVVVVAAAGNEGTSGSSSTVGYPGKYPSVIAVGAVDSSNQRASFSSVGPELDVMAPGVSIQSTLPGNKYGALNGTSMASPHVAGAAALILSKHPNWTNTQVRSSLENTTTKLGDSFYYGKGLINVQAAAQ

SEQ ID NO: 70278 - protein, 275 aa, Bacillus sp.
AQTVPWGIPHIKADKAHAAGVTGSGVKVAILDTGIDANHADLNVKGGASFVSGEPNALQDGNGHGTHVAGTVAALDNTTGVLGVAYNADLYAVKVLSASGSGTLSGIAQGIEWSISNRMNVINMSLGQMHGSTALQQACNNAYNRGIVVIAAAGNSGSSGNRNTMDYPARYSSVIAVGAVSSNNTRASFSSVGSELEVMAPGVNILSTTPGNNYASFNGTSMAAPHVAGAAALIKAKYPSMTNVQIRNRLKNTATNLGDPFFYGKGVINVESALQ

SEQ ID NO: 70279 - protein, 275 aa, Bacillus amyloliquefaciens
AQSVPYGVSQIKAPALHSQGYTGSNVKVAVIDSGIDSSHPDLKVAGGASMVPSETNPFQDNNSHGTHVAGTVAALNNSIGVLGVAPSASLYAVKVLGCGGSGQYSWIINGIEWAITNNMDVINMSLGGPSGSAALKAAVDKAVASGVVVVAAAGNEGTSGSSSTVGYPGKYPSVIAVGAVDSSNQRASFSSVGPELDVMAPGVSIQSTLPGNKYGALNGTSMASPHVAGAAALILSKHPNWTNTQVRSSLENTTTKLGDSFYYGKGLINVQAAAQ

SEQ ID NO: 70280 - protein, 275 aa, Bacillus amyloliquefaciens
AQSVPYGVSQIKAPALHSQGYTGSNVKVAVIDSGIDSSHPDLKVAGGASMVPSETNPFQDNNSHGTHVAGTVAALNNSIGVLGVAPSASLYAVKVLLCSGSGQYSWIINGIEWAIANNMDVINMSLGGPSGSAALKAAVDKAVASGVVVVAAAGNEGTSGSSSTVGYPGKYPSVIAVGAVDSSNQRASFSSVGPELDVMAPGVSIQSTLPGNKYGALNGTSMASPHVAGAAALILSKHPNWTNTQVRSSLENTTTKLGDSFYYGKGLINVQAAAQ

SEQ ID NO: 70281 - protein, 275 aa, Bacillus amyloliquefaciens
AQSVPYGVSQIKAPALHSQGYTGSNVKVAVIDSGIDSSHPDLKVAGGASMVPSETNPFQDNNSHGTHVAGTVAALNNSIGVLGVAPSASLYAVKVLGGRGSGQYSWIINGIEWAITNNMDVINMSLGGPSGSAALKAAVDKAVASGVVVVAAAGNEGTSGSSSTVGYPGKYPSVIAVGAVDSSNQRASFSSVGPELDVMAPGVSIQSTLPGNKYGALNGTSMASPHVAGAAALILSKHPNWTNTQVRSSLENTTTKLGDSFYYGKGLINVQAAAQ

SEQ ID NO: 70282 - protein, 275 aa, Bacillus sp.
AQTVPWGIPHIKADKAHAAGVTGSGVKVAILDTGIDANHADLNVKGGASFVSGEPNALQDGNGHGTHVAGTVAALDNTTGVLGVAYNADLYAVKVLSASGSGTLSGIAQGIEWSISNRMNVINMSLGWHDGSTALQQACNNAYNRGIVVIAAAGNSGSSGNRNTMDYPARYSSVIAVGAVSSNNTRASFSSVGSELEVMAPGVNILSTTPGNNYASFNGTSMAAPHVAGAAALIKAKYPSMTNVQIRNRLKNTATNLGDPFFYGKGVINVESALQ

SEQ ID NO: 70283 - protein, 275 aa, Bacillus sp.
AQTVPWGIPHIKADKAHAAGVTGSGVKVAILDTGIDANHADLNVKGGASFVSGEPNALQDGNGHGTHVAGTVAALDNTTGVLGVAYNADLYAVKVLSASGSGTLSGIAQGIEWSISNRMNVINMSLGHVHGSTALQQACNNAYNRGIVVIAAAGNSGSSGNRNTMDYPARYSSVIAVGAVSSNNTRASFSSVGSELEVMAPGVNILSTTPGNNYASFNGTSMAAPHVAGAAALIKAKYPSMTNVQIRNRLKNTATNLGDPFFYGKGVINVESALQ

SEQ ID NO: 70284 - protein, 275 aa, Synthetic construct
AQVVPWGIPHIKADKAHASGVTGSGVKVAVLDTGIDANHEDLNVKGGASFVSGEPNALQDGNGHGTHVAGTVAALNNTTGVLGVAYNAFLYAVKVLGASGSGTLSGIAQGIEWSIANDMDVINMSLGIPTGSTALQQACNNAYASGIVVVAAAGNSGSNGKRNTMGYPARYSSVIAVGAVDSSNNRASFSSVGSELEVMAPGVSILSTTPGNNYESFNGTSMASPHVAGAAALIKAKYPSMTNVQIRNKLKNTATNLGDAFYYGHGVINVEKALQ

SEQ ID NO: 70285 - protein, 275 aa, Bacillus sp.
AQTVPWGIPHIKADKAHAAGVTGSGVKVAILDTGIDANHADLNVKGGASFVSGEPNALQDGNGHGTHVAGTVAALDNTTGVLGVAYNADLYAVKVLSASGSGTLSGIAQGIEWSISNRMNVINMSLGDPFGSTALQQACNNAYNRGIVVIAAAGNSGSSGNRNTMDYPARYSSVIAVGAVSSNNTRASFSSVGSELEVMAPGVNILSTTPGNNYASFNGTSMAAPHVAGAAALIKAKYPSMTNVQIRNRLKNTATNLGDPFFYGKGVINVESALQ

SEQ ID NO: 70286 - protein, 275 aa, Bacillus sp.
AQTVPWGIPHIKADKAHAAGVTGSGVKVAILDTGIDANHADLNVKGGASFVSGEPNALQDGNGHGTHVAGTVAALDNTTGVLGVAYNADLYAVKVLSASGSGTLSGIAQGIEWSISNRMNVINMSLGRVEGSTALQQACNNAYNRGIVVIAAAGNSGSSGNRNTMDYPARYSSVIAVGAVSSNNTRASFSSVGSELEVMAPGVNILSTTPGNNYASFNGTSMAAPHVAGAAALIKAKYPSMTNVQIRNRLKNTATNLGDPFFYGKGVINVESALQ

SEQ ID NO: 70287 - protein, 276 aa, Bacillus amyloliquefaciens
AQSVPYGVSQIKAPALHSQGYTGSNVKVAVIDSGIDSSHPDLKVAGGASMVPSETNPFQDNNSHGTHVAGTVAALNNSIGVLGVAPSASLYAVKVLGASGGSGQYSWIINGIEWAIANNMDVINMSLGGPSGSAALKAAVDKAVASGVVVVAAAGNEGTSGSSSTVGYPGKYPSVIAVGAVDSSNQRASFSSVGPELDVMAPGVSIQSTLPGNKYGALNGTSMASPHVAGAAALILSKHPNWTNTQVRSSLENTTTKLGDSFYYGKGLINVQAAAQ

SEQ ID NO: 70288 - protein, 276 aa, Bacillus amyloliquefaciens
AQSVPYGVSQIKAPALHSQGYTGSNVKVAVIDSGIDSSHPDLKVAGGASMVPSETNPFQDNNSHGTHVAGTVAALNNSIGVLGVAPSASLYAVKVLSSGDGSGQYSWIINGIEWAIANNMDVINMSLGGPSGSAALKAAVDKAVASGVVVVAAAGNEGTSGSSSTVGYPGKYPSVIAVGAVDSSNQRASFSSVGPELDVMAPGVSIQSTLPGNKYGALNGTSMASPHVAGAAALILSKHPNWTNTQVRSSLENTTTKLGDSFYYGKGLINVQAAAQ

SEQ ID NO: 70289 - protein, 275 aa, Bacillus amyloliquefaciens
AQSVPYGVSQIKAPALHSQGYTGSNVKVAVIDSGIDSSHPDLKVAGGASMVPSETNPFQDNNSHGTHVAGTVAALNNSIGVLGVAPSASLYAVKVLSCSGSGQYSWIINGIEWAIANNMDVINMSLGGPSGSAALKAAVDKAVASGVVVVAAAGNEGTSGSSSTVGYPGKYPSVIAVGAVDSSNQRASFSSVGPELDVMAPGVSIQSTLPGNKYGALNGTSMASPHVAGAAALILSKHPNWTNTQVRSSLENTTTKLGDSFYYGKGLINVQAAAQ

SEQ ID NO: 70290 - protein, 275 aa, Bacillus amyloliquefaciens
AQSVPYGISQIKAPALHSQGYTGSNVKVAVIDSGIDSSHPDLKVAGGASMVPSETNPFQDNNSHGTHVAGTVAALNNSIGVLGVAPSASLYAVKVLGGRGSGQYSWIINGIEWAIANNMDVINMSLGGPSGSAALKAAVDKAVASGVVVVAAAGNEGTSGSSSTVGYPGKYPSVIAVGAVDSSNQRASFSSVGPELDVMAPGVSIQSTLPGNKYGALNGTSMASPHVAGAAALILSKHPNWTNTQVRSSLENTTTKLGDSFYYGKGLINVQAAAQ

SEQ ID NO: 70291 - protein, 275 aa, Bacillus amyloliquefaciens
AQSVPYGVSQIKAPALHSQGYTGSNVKVAVIDSGIDSSHPDLKVAGGASMVPSETNPFQDNNSHGTHVAGTVAALNNSIGVLGVAPSASLYAVKVLNGVGSGQYSWIINGIEWAIANNMDVINMSLGGPSGSAALKAAVDKAVASGVVVVAAAGNEGTSGSSSTVGYPGKYPSVIAVGAVDSSNQRASFSSVGPELDVMAPGVSIQSTLPGNKYGALNGTSMASPHVAGAAALILSKHPNWTNTQVRSSLENTTTKLGDSFYYGKGLINVQAAAQ

SEQ ID NO: 70292 - protein, 275 aa, Synthetic construct
AQVVPWGIPHIKADKAHASGVTGSGVKVAVLDTGIDANHADLNVKGGASFVSGEPNALQDGNGHGTHVAGTVAALDNTTGVLGVAYNAFLYAVKVLGASGSGTLSGIAQGIEWSIANDMDVINMSLGISTGSTALQQACNNAYASGIVVVAAAGNSGSNGKRNTMGYPARYSSVIAVGAVDSSNQRASFSSVGSELEVMAPGVSILSTTPGNNYESFNGTSMASPHVAGAAALIKAKYPSMTNVQIRNKLKNTATNLGDAFYYGHGVINVEKALQ

SEQ ID NO: 70293 - protein, 275 aa, Bacillus sp.
AQTVPWGIPHIKADKAHAAGVTGSGVKVAILDTGIDANHADLNVKGGASFVSGEPNALQDGNGHGTHVAGTVAALDNTTGVLGVAYNADLYAVKVLSASGSGTLSGIAQGIEWSISNRMNVINMSLGHPLGSTALQQACNNAYNRGIVVIAAAGNSGSSGNRNTMDYPARYSSVIAVGAVSSNNTRASFSSVGSELEVMAPGVNILSTTPGNNYASFNGTSMAAPHVAGAAALIKAKYPSMTNVQIRNRLKNTATNLGDPFFYGKGVINVESALQ

SEQ ID NO: 70294 - protein, 275 aa, Bacillus amyloliquefaciens
AQTVPYGVSQIKAPALHSQGYTGSNVKVAVIDSGIDSSHPDLKVAGGASMVPSETNPFQDNNSHGTHVAGTVAALDNNIGVLGVAPSASLYAVKVLGADGSGQYSWIINGIEWAIANNMDVINMSLGGPSGSAALKAAVDKAVASGVVVVAAAGNEGTSGSSSTVGYPGKYPSVIAVGAVDSSNQRASFSSVGPELDVMAPGVSIQSTLPGNKYGAYNGTSMASPHVAGAAALILSKHPNWTNTQVRSSLENTTTKLGDSFYYGKGLINVQAAAQ

SEQ ID NO: 70295 - protein, 275 aa, Bacillus amyloliquefaciens
AQSVPYGVSQIKATALHSQGYTGSNVKVAVIDSGIDSSHPDLKVAGGASMVPGESNAFQDNNSHGTHVAGTVAALNNSIGVLGVAPSASLYAVKVLGADGSGQYSWIINGIEWAIANNMDVINMSLGGPSGSAALKAAVDKAVASGVVVVAAAGNEGTSGSSSTVGYPGKYPSVIAVGAVDSSNQRASFSSVGPELDVMAPGVSIQSTLPGNKYGALNGTSMASPHVAGAAALILSKHPNWTNTQVRSSLENTTTKLGDSFYYGKGLINVQAAAQ

SEQ ID NO: 70296 - protein, 275 aa, Bacillus sp.
AQTVPWGIPHIKADKAHAAGVTGSGVKVAILDTGIDANHADLNVKGGASFVSGEPNALQDGNGHGTHVAGTVAALDNTTGVLGVAYNADLYAVKVLSASGSGTLSGIAQGIEWSISNGMNVINMSLGVMHGSTALQQACNNAYNRGIVVIAAAGNDGSSGNRNTMDYPARYSSVIAVGAVSSNNTRASFSSVGSELEVMAPGVNILSTTPGNNYASRNGTSMAAPHVAGAAALIKAKYPSMTNVQIRNRLKNTATNLGDPFFYGKGVINVEKALQ

SEQ ID NO: 70297 - protein, 275 aa, Synthetic construct
AQSVPYGVSQIKAPALHSQGYTGSNVKVAVIDSGIDSSHPDLKVAGGASMVPSETNPFQDNNSAGTHVAGTVAALNNSIGVLGVAPSASLYAVKVLGADGSGQYSWIINGIEWAIANNMDVINMSLGGPSGSAALKAAVDKAVASGVVVVAAAGNSGTSGSSSTVGYPAKYPSVIAVGAVDSSNQRASFSSVGPELDVMAPGVSIQSTLPGNKYGALNGTSMASPHVAGAAALILSKHPNWTNTQVRSSLENTTTKLGDSFYYGKGLINVQAAAQ

SEQ ID NO: 70298 - protein, 275 aa, Bacillus sp.
AQTVPWGIPHIKADKAHAAGVTGSGVKVAILDTGIDANHADLNVKGGASFVSGEPNALQDGNGHGTHVAGTVAALDNTTGVLGVAYNADLYAVKVLSASGSGTLSGIAQGIEWSISNRMNVINMSLGSEWGSTALQQACNNAYNRGIVVIAAAGNSGSSGNRNTMDYPARYSSVIAVGAVSSNNTRASFSSVGSELEVMAPGVNILSTTPGNNYASFNGTSMAAPHVAGAAALIKAKYPSMTNVQIRNRLKNTATNLGDPFFYGKGVINVESALQ

SEQ ID NO: 70299 - protein, 275 aa, Bacillus amyloliquefaciens
AQSVPYGVSQIKAPALHSQGYTGSNVKVAVIDSGIDSSHPDLKVAGGASMVPSETNPFQDNNSHGTHVAGTVAALNNSIGVLGVAPSASLYAVKVLLGSGSGQYSWIINGIEWAIANNMDVINMSLGGPSGSAALKAAVDKAVASGVVVVAAAGNEGTSGSSSTVGYPGKYPSVIAVGAVDSSNQRASFSSVGPELDVMAPGVSIQSTLPGNKYGALNGTSMASPHVAGAAALILSKHPNWTNTQVRSSLENTTTKLGDSFYYGKGLINVQAAAQ

SEQ ID NO: 70300 - protein, 275 aa, Bacillus amyloliquefaciens
AQSVPYGVSQIKAPALHSQGYTGSNVKVAVIDSGIDSSHPDLKVAGGASMVPSETNPFQDNNSHGTHVAGTVAALNNSIGVLGVAPSASLYAVKVLRSCGSGQYSWIINGIEWAIANNMDVINMSLGGPSGSAALKAAVDKAVASGVVVVAAAGNEGTSGSSSTVGYPGKYPSVIAVGAVDSSNQRASFSSVGPELDVMAPGVSIQSTLPGNKYGALNGTSMASPHVAGAAALILSKHPNWTNTQVRSSLENTTTKLGDSFYYGKGLINVQAAAQ

SEQ ID NO: 70301 - protein, 275 aa, Bacillus amyloliquefaciens
AQSVPYGVSQIKAPALHSQGYTGSNVKVAVIDSGIDSSHPDLKVAGGASMVPSETNPFQDNNSHGTHVAGTVAALNNSIGVLGVAPSASLYAVKVLGRSGSGQYSWIINGIEWAIANNMDVINMSLGGPSGSAALKAAVDKAVASGVVVVAAAGNEGTSGSSSTVGYPGKYPSVIAVGAVDSSNQRASFSSVGPELDVMAPGVSIQSTLPGNKYGALNGTSMASPHVAGAAALILSKHPNWTNTQVRSSLENTTTKLGDSFYYGKGLINVQAAAQ

SEQ ID NO: 70302 - protein, 275 aa, Bacillus sp.
AQTVPWGIPHIKADKAHAAGVTGSGVKVAILDTGIDANHADLNVKGGASFVFGEPNALQDGNGHGTHVAGTVAALDNTTGVLGVAYNADLYAVKVLSASGSGTLSGIAQGIEWSISNRMNVINMSLGDFYGSTALQQACNNAYNRGIVVIAAAGNSGSSGNRNTMDYPARYSSVIAVGAVSSNNTRASFSSVGSELEVMAPGVNILSTTPGNNYASRNGTSMAAPHVAGAAALIKAKYPSMTNVQIRNRLKNTATELGDPFFYGKGVINVEKALQ

SEQ ID NO: 70303 - protein, 275 aa, Bacillus amyloliquefaciens
AQSVPYGVSQIKAPALHSQGYTGSNVKVAVIDSGIDSSHPDLKVAGGASMVPGESXAFQDNNSHGTHVAGTVAALNNSIGVLGVAPSASLYAVKVLGADGSGQYSWIINGIEWAIANRMDVINMSLGGPSGSAALKAAVDKAVASGVVVVAAAGNEGTSGSSSTVGYPGKYPSVIAVGAVDSSNQRASFSSVGPELDVMAPGVSIQSTLPGNKYGALNGTSMASPHVAGAAALILSKHPNWTNTQVRSSLENTTTKLGDSFYYGKGLINVQAAAQ

SEQ ID NO: 70304 - protein, 275 aa, Bacillus sp.
AQTVPWGIPHIKADKAHAAGVTGSGVKVAILDTGIDANHADLNVKGGASFVSGEPNALQDGNGHGTHVAGTVAALDNTTGVLGVAYNADLYAVKVLSASGSGTLSGIAQGIEWSISNRMNVINMSLGHSIGSTALQQACNNAYNRGIVVIAAAGNSGSSGNRNTMDYPARYSSVIAVGAVSSNNTRASFSSVGSELEVMAPGVNILSTTPGNNYASFNGTSMAAPHVAGAAALIKAKYPSMTNVQIRNRLKNTATNLGDPFFYGKGVINVESALQ

SEQ ID NO: 70305 - protein, 275 aa, Bacillus sp.
AQTVPWGIPHIKADKAHAAGVTGSGVKVAILDTGIDANHADLNVKGGASFVSGEPNALQDGNGHGTHVAGTVAALDNTTGVLGVAYNADLYAVKVLSASGSGTLSGIAQGIEWSISNRMNVINMSLGHQIGSTALQQACNNAYNRGIVVIAAAGNSGSSGNRNTMDYPARYSSVIAVGAVSSNNTRASFSSVGSELEVMAPGVNILSTTPGNNYASFNGTSMAAPHVAGAAALIKAKYPSMTNVQIRNRLKNTATNLGDPFFYGKGVINVESALQ

SEQ ID NO: 70306 - protein, 275 aa, Bacillus sp.
AQTVPWGIPHIKADKAHAAGVTGSGVKVAILDTGIDANHADLNVKGGASFVSGEPNALQDGNGHGTHVAGTVAALDNTTGVLGVAYNADLYAVKVLSASGSGTLSGIAQGIEWSISNRMNVINMSLGVMHGSTALQQACNNAYNRGIVVIAAAGNSGSSGNRNTMDYPARYSSVIAVGAVSSNNTRASFSSVGSELEVMAPGVNILSTTPGNNYASFNGTSMAAPHVAGAAALIKAKYPSMTNVQIRNRLKNTATELGDPFFYGKGVINVEKALQ

SEQ ID NO: 70307 - protein, 275 aa, Bacillus amyloliquefaciens
AQSVPYGVSQIKAPALHSQGYTGSNVKVAVIDSGIDSSHPDLKVAGGASMVPSETNPFQDNNSHGTHVAGTVAALNNSIGVLGVAPSASLYAVKVLSSGGSGQYSWIINGIEWAIANNMDVINMSLGGPSGSAALKAAVDKAVASGVVVVAAAGNEGTSGSSSTVGYPGKYPSVIAVGAVDSSNQRASFSSVGPELDVMAPGVSIQSTLPGNKYGALNGTSMASPHVAGAAALILSKHPNWTNTQVRSSLENTTTKLGDSFYYGKGLINVQAAAQ

SEQ ID NO: 70308 - protein, 275 aa, Bacillus sp.
AQTVPWGIPHIKADKAHAAGVTGSGVKVAILDTGIDANHADLNVKGGASFVSGEPNALQDGNGHGTHVAGTVAALDNTTGVLGVAYNADLYAVKVLSASGSGTLSGIAQGIEWSISNRMNVINMSLGVHEGSTALQQACNNAYNRGIVVIAAAGNSGSSGNRNTMDYPARYSSVIAVGAVSSNNTRASFSSVGSELEVMAPGVNILSTTPGNNYASFNGTSMAAPHVAGAAALIKAKYPSMTNVQIRNRLKNTATNLGDPFFYGKGVINVESALQ

SEQ ID NO: 70309 - protein, 275 aa, Bacillus sp.
AQTVPWGIPHIKADKAHAAGVTGSGVKVAILDTGIDANHADLNVKGGASFVSGEPNALQDGNGHGTHVAGTVAALDNTTGVLGVAYNADLYAVKVLSASGSGTLSGIAQGIEWSISNRMNVINMSLGDELGSTALQQACNNAYNRGIVVIAAAGNSGSSGNRNTMDYPARYSSVIAVGAVSSNNTRASFSSVGSELEVMAPGVNILSTTPGNNYASFNGTSMAAPHVAGAAALIKAKYPSMTNVQIRNRLKNTATNLGDPFFYGKGVINVESALQ

SEQ ID NO: 70310 - protein, 275 aa, Bacillus amyloliquefaciens
AQSVPYGVSQIKAPALHSQGYTGSNVKVAVIDSGIDSSHPDLKVAGGASMVPGESXAFQDNNSHGTHVAGTVAALNNSIGVLGVAPSASLYAVKVLGADGSGQYSWIINGIEWAIANNMDVINMSLGGPSGSAALKAAVDKAVASGVVVVAAAGNEGTSGSSSTVGYPGKYPSVIAVGAVDSSNQRASFSSVGPELDVMAPGVSIQSTLPGNKYGALNGTSMASPHVAGAAALILSKHPNWTNTQVRSSLENTTTKLGDSFYYGKGLINVQAAAQ

SEQ ID NO: 70311 - protein, 275 aa, Bacillus amyloliquefaciens
AQSVPYGVSQIKAPALHSQGYTGSNVKVAVIDSGIDSSHPDLKVAGGASMVPSETNPFQDNNSHGTHVAGTVAALDNNIGVLGVAPSASLYAVKVLGADGSGQYSWIINGIEWAIANNMDVINMSLGGPSGSAALKAAVDKAVASGVVVVAAAGNEGTSGSSSTVGYPGKYPSVIAVGAVDSSNQRASFSSVGPELDVMAPGVSIQSTLPGNKYGALNGTSMASPHVAGAAALILSKHPNWTNTQVRSSLENTTTKLGDSFYYGKGLINVQAAAQ

SEQ ID NO: 70312 - protein, 275 aa, Bacillus sp.
AQTVPWGIPHIKADKAHAAGVTGSGVKVAILDTGIDANHADLNVKGGASFVSGEPNALQDGNGHGTHVAGTVAALDNTTGVLGVAYNADLYAVKVLSASGSGTLSGIAQGIEWSISNRMNVINMSLGDFYGSTALQQACNNAYNRGIVVIAAAGNSGSSGNRNTMDYPARYSSVIAVGAVSSNNTRASFSSVGSELEVMAPGVNILSTTPGNNYASRNGTSMAAPHVAGAAALIKAKYPSMTNVQIRNRLKNTATELGDPFFYGKGVINVEKALQ

SEQ ID NO: 70313 - protein, 275 aa, Bacillus amyloliquefaciens
AQSVPYGVSQIKAPALHSQGYTGSNVKVAVIDSGIDSSHPDLKVAGGASMVPSETNPFQDNNSHGTHVAGTVAALNNSIGVLGVAPSASLYAVKVLHSIGSGQYSWIINGIEWAIANNMDVINMSLGGPSGSAALKAAVDKAVASGVVVVAAAGNEGTSGSSSTVGYPGKYPSVIAVGAVDSSNQRASFSSVGPELDVMAPGVSIQSTLPGNKYGALNGTSMASPHVAGAAALILSKHPNWTNTQVRSSLENTTTKLGDSFYYGKGLINVQAAAQ

SEQ ID NO: 70314 - protein, 275 aa, Bacillus sp.
AQTVPWGIPHIKADKAHAAGVTGSGVKVAILDTGIDANHADLNVKGGASFVSGEPNALQDGNGHGTHVAGTVAALDNTTGVLGVAYNADLYAVKVLSASGSGTLSGIAQGIEWSISNRMNVINMSLGHPNGSTALQQACNNAYNRGIVVIAAAGNSGSSGNRNTMDYPARYSSVIAVGAVSSNNTRASFSSVGSELEVMAPGVNILSTTPGNNYASFNGTSMAAPHVAGAAALIKAKYPSMTNVQIRNRLKNTATNLGDPFFYGKGVINVESALQ

SEQ ID NO: 70315 - protein, 275 aa, Bacillus sp.
AQTVPWGIPHIKADKAHAAGVTGSGVKVAILDTGIDANHADLNVKGGASFVSGEPNALQDGNGHGTHVAGTVAALDNTTGVLGVAYNADLYAVKVLSASGSGTLSGIAQGIEWSISNRMNVINMSLGWQFGSTALQQACNNAYNRGIVVIAAAGNSGSSGNRNTMDYPARYSSVIAVGAVSSNNTRASFSSVGSELEVMAPGVNILSTTPGNNYASFNGTSMAAPHVAGAAALIKAKYPSMTNVQIRNRLKNTATNLGDPFFYGKGVINVESALQ

SEQ ID NO: 70316 - protein, 275 aa, Bacillus amyloliquefaciens
AQSVPYGVSQIKAPALHSQGYTGSNVKVAVIDTGIDSSHPDLKVAGGASMVPSETNPFQDNNSHGTHVAGTVAALDNSIGVLGVAPSASLYAVKVLGADGSGQYSWIINGIEWAIANNMDVINMSLGGPSGSAALKAAVDKAVASGVVVVAAAGNEGTSGSSSTVGYPGKYPSVIAVGAVDSSNQRASFSSVGPELDVMAPGVSIQSTLPGNKYGAYNGTSMASPHVAGAAALILSKHPNWTNTQVRSSLENTTTKLGDSFYYGKGLINVQAAAQ

SEQ ID NO: 70317 - protein, 275 aa, Bacillus sp.
AQTVPWGIPHIKADKAHAAGVTGSGVKVAILDTGIDANHADLNVKGGASFVSGEPNALQDGNGHGTHVAGTVAALDNTTGVLGVAYNADLYAVKVLSASGSGTLSGIAQGIEWSISNRMNVINMSLGEVMGSTALQQACNNAYNRGIVVIAAAGNSGSSGNRNTMDYPARYSSVIAVGAVSSNNTRASFSSVGSELEVMAPGVNILSTTPGNNYASFNGTSMAAPHVAGAAALIKAKYPSMTNVQIRNRLKNTATNLGDPFFYGKGVINVESALQ

SEQ ID NO: 70318 - protein, 276 aa, Bacillus amyloliquefaciens
AQSVPYGVSQIKAPALHSQGYTGSNVKVAVIDSGIDSSHPDLKVAGGASMVPSETNPFQDNNSHGTHVAGTVAALNNSIGVLGVAPSASLYAVKVLGNADGSGQYSWIINGIEWAIANNMDVINMSLGGPSGSAALKAAVDKAVASGVVVVAAAGNEGTSGSSSTVGYPGKYPSVIAVGAVDSSNQRASFSSVGPELDVMAPGVSIQSTLPGNKYGALNGTSMASPHVAGAAALILSKHPNWTNTQVRSSLENTTTKLGDSFYYGKGLINVQAAAQ

SEQ ID NO: 70319 - protein, 275 aa, Bacillus amyloliquefaciens
AQSVPYGISQIKAPALHSQGYTGSNVKVAVIDSGIDSSHPDLKVAGGASMVPSETNPFQDNNSHGTHVAGTVAALNNSIGVLGVAPSASLYAVKVLGNDGSGQYSWIINGIEWAIANNMDVINMSLGGPSGSAALKAAVDKAVASGVVVVAAAGNEGTSGSSSTVGYPGKYPSVIAVGAVDSSNQRASFSSVGPELDVMAPGVSIQSTLPGNKYGALNGTSMASPHVAGAAALILSKHPNWTNTQVRSSLENTTTKLGDSFYYGKGLINVQAAAQ

SEQ ID NO: 70320 - protein, 275 aa, Synthetic construct
AQVVPWGIPHIKADKAHASGVTGSGVKVAVLDTGIDANHADLNVKGGASFVSGEPNALQDGNGHGTHVAGTVAALDNTTGVLGVAYNAFLYAVKVLGASGSGTLSGIAQGIEWSIANDMDVINMSLGISTGSTALQQACNNAYASGIVVVAAAGNSGSNGKRNTMQYPARYSSVIAVGAVDSSNNRASFSSVGSELEVMAPGVSILSTTPGNNYESFNGTSMASPHVAGAAALIKAKYPSMTNVQIRNKLKNTATNLGDAFYYGHGVINVEKALQ

SEQ ID NO: 70321 - protein, 275 aa, Synthetic construct
AQVVPWGIPHIKADKAHASGVTGSGVKVAVLDTGIDANHADLNVKGGASFVSGEPNALQDGNGHGTHVAGTVAALDNNTGVLGVAYNAFLYAVKVLGASGSGTLSGIAQGIEWSIANDMDVINMSLGISTGSTALQQACNNAYASGIVVVAAAGNSGSNGKRNTMGYPARYSSVIAVGAVDSSNNRASFSSVGSELEVMAPGVSILSTTPGNNYESFNGTSMASPHVAGAAALIKAKYPSMTNVQIRNKLKNTATNLGDAFYYGHGVINVEKALQ

SEQ ID NO: 70322 - protein, 276 aa, Bacillus amyloliquefaciens
AQSVPYGVSQIKAPALHSQGYTGSNVKVAVIDSGIDSSHPDLKVAGGASMVPSETNPFQDNNSHGTHVAGTVAALNNSIGVLGVAPSASLYAVKVLGASRGSGQYSWIINGIEWAIANNMDVINMSLGGPSGSAALKAAVDKAVASGVVVVAAAGNEGTSGSSSTVGYPGKYPSVIAVGAVDSSNQRASFSSVGPELDVMAPGVSIQSTLPGNKYGALNGTSMASPHVAGAAALILSKHPNWTNTQVRSSLENTTTKLGDSFYYGKGLINVQAAAQ

SEQ ID NO: 70323 - protein, 275 aa, Synthetic construct
AQVVPWGIPHIKADKAHASGVTGSGVKVAVLDTGIDANHEDLNVKGGASFVSGEPNALQDGNGHGTHVAGTVAALNNTTGVLGVAYNAFLYAVKVLGASGSGTLSGIAQGIEWSIANDMDVINMSLGSSTGSTALQQACNNAYASGIVVVAAAGNSGSNGKRNTMGYPARYSSVIAVGAVDSSNNRASFSSVGSELEVMAPGVSILSTTPGNNYESFNGTSMASPHVAGAAALIKAKYPSMTNVQIRNKLKNTATNLGDAFYYGHGVINVEKALQ

SEQ ID NO: 70324 - protein, 275 aa, Bacillus sp.
AQTVPWGIPHIKADKAHAAGVTGSGVKVAILDTGIDANHADLNVKGGASFVFGEPNALQDGNGHGTHVAGTVAALDNTTGVLGVAYNADLYAVKVLSASGSGTLSGIAQGIEWSISNRMNVINMSLGDFYGSTALQQACNNAYNRGIVVIAAAGNSGSSGNRNTMDYPARYSSVIAVGAVSSNNTRASFSSVGSELEVMAPGVNILSTTPGNNYASRNGTSMAAPHVAGAAALIKAKYPSMTNVQIRNRLKNTATRLGDPFFYGKGVINVESALQ

SEQ ID NO: 70325 - protein, 275 aa, Bacillus sp.
AQTVPWGIPHIKADKAHAAGVTGSGVKVAILDTGIDANHADLNVKGGASFVFGEPNALQDGNGHGTHVAGTVAALDNTTGVLGVAYNADLYAVKVLSASGSGTLSGIAQGIEWSISNRMNVINMSLGDFYGSTALQQACNNAYNRGIVVIAAAGNSGSSGNRNTMDYPARYSSVIAVGAVSSNNTRASFSSVGSELEVMAPGVNILSTTPGNNYASRNGTSMAAPHVAGAAALIKAKYPSMTNVQIRNRLKNTATELGDPFFYGKGVINVESALQ

SEQ ID NO: 70326 - protein, 274 aa, Bacillus amyloliquefaciens
AQSVPYGVSQIKAPALHSQGYTGSNVKVAVIDSGIDSSHPDLKVAGGASMVPGESAFQDNNSHGTHVAGTVAALNNSIGVLGVAPSASLYAVKVLGADGSGQYSWIINGIEWAIANRMDVINMSLGGPSGSAALKAAVDKAVASGVVVVAAAGNEGTSGSSSTVGYPGKYPSVIAVGAVDSSNQRASFSSVGPELDVMAPGVSIQSTLPGNKYGALNGTSMASPHVAGAAALILSKHPNWTNTQVRSSLENTTTKLGDSFYYGKGLINVQAAAQ

SEQ ID NO: 70327 - protein, 275 aa, Synthetic construct
AQVVPWGIPHIKADKAHASGVTGSGVKVAVLDTGIDANHADLNVKGGASFVSGEPNALQDGNGHGTHVAGTVAALDNTIGVLGVAYNAFLYAVKVLGASGSGTLSGIAQGIEWSIANDMDVINMSLGISTGSTALQQACNNAYASGIVVVAAAGNSGSNGKRNTMGYPARYSSVIAVGAVDSSNNRASFSSVGSELEVMAPGVSILSTTPGNNYESFNGTSMASPHVAGAAALIKAKYPSMTNVQIRNKLKNTATNLGDAFYYGHGVINVEKALQ

SEQ ID NO: 70328 - protein, 275 aa, Bacillus sp.
AQTVPWGIPHIKADKAHAAGVTGSGVKVAILDTGIDANHADLNVKGGASFVSGEPNALQDGNGHGTHVAGTVAALDNTTGVLGVAYNADLYAVKVLSASGSGTLSGIAQGIEWSISNRMNVINMSLGNNHGSTALQQACNNAYNRGIVVIAAAGNSGSSGNRNTMDYPARYSSVIAVGAVSSNNTRASFSSVGSELEVMAPGVNILSTTPGNNYASFNGTSMAAPHVAGAAALIKAKYPSMTNVQIRNRLKNTATNLGDPFFYGKGVINVESALQ

SEQ ID NO: 70329 - protein, 275 aa, Bacillus sp.
AQTVPWGIPHIKADKAHAAGVTGSGVKVAILDTGIDANHADLNVKGGASFVSGEPNALQDGNGHGTHVAGTVAALDNTTGVLGVAYNADLYAVKVLSASGSGTLSGIAQGIEWSISNRMNVINMSLGHLLGSTALQQACNNAYNRGIVVIAAAGNSGSSGNRNTMDYPARYSSVIAVGAVSSNNTRASFSSVGSELEVMAPGVNILSTTPGNNYASFNGTSMAAPHVAGAAALIKAKYPSMTNVQIRNRLKNTATNLGDPFFYGKGVINVESALQ

SEQ ID NO: 70330 - protein, 275 aa, Bacillus sp.
AQTVPWGIPHIKADKAHAAGVTGSGVKVAILDTGIDANHADLNVKGGASFVSGEPNALQDGNGHGTHVAGTVAALDNTTGVLGVAYNADLYAVKVLSASGSGTLSGIAQGIEWSISNRMNVINMSLGKINGSTALQQACNNAYNRGIVVIAAAGNSGSSGNRNTMDYPARYSSVIAVGAVSSNNTRASFSSVGSELEVMAPGVNILSTTPGNNYASFNGTSMAAPHVAGAAALIKAKYPSMTNVQIRNRLKNTATNLGDPFFYGKGVINVESALQ

SEQ ID NO: 70331 - protein, 275 aa, Bacillus amyloliquefaciens
AQSVPYGVSQIKAPALHSQGYTGSNVKVAVIDSGIDSSHPDLKVAGGASMVPGEPXPFQDNNGHGTHVAGTVAALNNSIGVLGVAPSASLYAVKVLGADGSGQYSWIINGIEWAIANNMDVINMSLGGPSGSAALKAAVDKAVASSVVVVAAAGNEGTSGSSSTVGYPGKYPSVIAVGAVDSSNQRASFSSVGPELDVMAPGVSIQSTLPGNKYGALNGTSMASPHVAGAAALILSKHPNWTNTQVRSSLENTTTKLGDSFYYGKGLINVQAAAQ

SEQ ID NO: 70332 - protein, 275 aa, Bacillus sp.
AQTVPWGIPHIKADKAHAAGVTGSGVKVAILDTGIDANHADLNVKGGASFVSGEPNALQDGNGHGTHVAGTVAALDNTTGVLGVAYNADLYAVKVLSASGSGTLSGIAQGIEWSISNRMNVINMSLGHRHGSTALQQACNNAYNRGIVVIAAAGNSGSSGNRNTMDYPARYSSVIAVGAVSSNNTRASFSSVGSELEVMAPGVNILSTTPGNNYASFNGTSMAAPHVAGAAALIKAKYPSMTNVQIRNRLKNTATNLGDPFFYGKGVINVESALQ

SEQ ID NO: 70333 - protein, 275 aa, Bacillus sp.
AQTVPWGIPHIKADKAHAAGVTGSGVKVAILDTGIDANHADLNVKGGASFVSGEPNALQDGNGHGTHVAGTVAALDNTTGVLGVAYNADLYAVKVLSASGSGTLSGIAQGIEWSISNRMNVINMSLGNMGGSTALQQACNNAYNRGIVVIAAAGNSGSSGNRNTMDYPARYSSVIAVGAVSSNNTRASFSSVGSELEVMAPGVNILSTTPGNNYASFNGTSMAAPHVAGAAALIKAKYPSMTNVQIRNRLKNTATNLGDPFFYGKGVINVESALQ

SEQ ID NO: 70334 - protein, 275 aa, Bacillus amyloliquefaciens
AQSVPYGVSQIKAPALHSQGYTGSNVKVAVIDSGIDSSHPDLKVAGGASMVPSETNPFQDNNSHGTHVAGTVAALNNSIGVLGVAPSASLYAVKVLHSGGSGQYSWIINGIEWAIANNMDVINMSLGGPSGSAALKAAVDKAVASGVVVVAAAGNEGTSGSSSTVGYPGKYPSVIAVGAVDSSNQRASFSSVGPELDVMAPGVSIQSTLPGNKYGALNGTSMASPHVAGAAALILSKHPNWTNTQVRSSLENTTTKLGDSFYYGKGLINVQAAAQ

SEQ ID NO: 70335 - protein, 275 aa, Bacillus amyloliquefaciens
AQSVPYGVSQIKAPALHSQGYTGSNVKVAVIDSGIDSSHPDLKVAGGASMVPSETNPFQDNNSHGTHVAGTVAALNNSIGVLGVAPSASLYAVKVLRGSGSGQYSWIINGIEWAIANNMDVINMSLGGPSGSAALKAAVDKAVASGVVVVAAAGNEGTSGSSSTVGYPGKYPSVIAVGAVDSSNQRASFSSVGPELDVMAPGVSIQSTLPGNKYGALNGTSMASPHVAGAAALILSKHPNWTNTQVRSSLENTTTKLGDSFYYGKGLINVQAAAQ

SEQ ID NO: 70336 - protein, 275 aa, Bacillus amyloliquefaciens
AQSVPYGVSQIKAPALHSQGYTGSNVKVAVIDSGIDSSHPDLKVAGGASMVPSETNPFQDNNSHGTHVAGTVAALNNSIGVLGVAPSASLYAVKVLGANGSGQYSWIINGIEWAITNNMDVINMSLGGPSGSAALKAAVDKAVASGVVVVAAAGNEGTSGSSSTVGYPGKYPSVIAVGAVDSSNQRASFSSVGPELDVMAPGVSIQSTLPGNKYGALNGTSMASPHVAGAAALILSKHPNWTNTQVRSSLENTTTKLGDSFYYGKGLINVQAAAQ

SEQ ID NO: 70337 - protein, 275 aa, Bacillus sp.
AQTVPWGIPHIKADKAHAAGVTGSGVKVAILDTGIDANHADLNVKGGASFVSGEPNALQDGNGHGTHVAGTVAALDNTTGVLGVAYNADLYAVKVLSASGSGTLSGIAQGIEWSISNRMNVINMSLGAMTGSTALQQACNNAYNRGIVVIAAAGNSGSSGNRNTMDYPARYSSVIAVGAVSSNNTRASFSSVGSELEVMAPGVNILSTTPGNNYASFNGTSMAAPHVAGAAALIKAKYPSMTNVQIRNRLKNTATNLGDPFFYGKGVINVESALQ

SEQ ID NO: 70338 - protein, 275 aa, Synthetic construct
AQVVPWGIPHIKADKAHASGVTGSGVKVAVLDTGIDANHEDLNVKGGASFVSGEPNALQDGNGHGTHVAGTVAALNNTTGVLGVAYNAFLYAVKVLGASGSGTLSGIAQGIEWSIANDMDVINMSLGISTGSTALQQACNNAYASGIVVVAAAGNSGSNGKRNTMGYPARYSSVIAVGAVDSSNNRASFSSVGSELEVMAPGVSILSTTPGNNYESFNGTSMASPHVAGAAALIKAKYPSMTNVQIRNKLKNTATNLGPAFYYGHGVINVEKALQ

SEQ ID NO: 70339 - protein, 275 aa, Bacillus sp.
AQTVPWGIPHIKADKAHAAGVTGSGVKVAILDTGIDANHADLNVKGGASFVSGEPNALQDGNGHGTHVAGTVAALDNTTGVLGVAYNADLYAVKVLSASGSGTLSGIAQGIEWSISNRMNVINMSLGHTTGSTALQQACNNAYNRGIVVIAAAGNSGSSGNRNTMDYPARYSSVIAVGAVSSNNTRASFSSVGSELEVMAPGVNILSTTPGNNYASFNGTSMAAPHVAGAAALIKAKYPSMTNVQIRNRLKNTATNLGDPFFYGKGVINVESALQ

SEQ ID NO: 70340 - protein, 275 aa, Bacillus amyloliquefaciens
AQSVPYGVSQIKATALHSQGYTGSNVKVAVIDSGIDSSHPDLKVAGGASMVPGESXPFQDNNSHGTHVAGTVAALNNSIGVLGVAPSASLYAVKVLGADGSGQYSWIINGIEWAIANNMDVINMSLGGPSGSAALKAAVDKAVASGVVVVAAAGNEGTSGSSSTVGYPGKYPSVIAVGAVDSSNQRASFSSVGPELDVMAPGVSIQSTLPGNKYGALNGTSMASPHVAGAAALILSKHPNWTNTQVRSSLENTTTKLGDSFYYGKGLINVQAAAQ

SEQ ID NO: 70341 - protein, 275 aa, Bacillus amyloliquefaciens
AQSVPYGVSQIKAPALHSQGYTGSNVKVAVIDSGIDSSHPDLKVAGGASMVPSETNPFQDNNSHGTHVAGTVAALNNSIGVLGVAPSASLYAVKVLGNSGSGQYSWIINGIEWAIANNMDVINMSLGGPSGSAALKAAVDKAVASGVVVVAAAGNEGTSGSSSTVGYPGKYPSVIAVGAVDSSNQRASFSSVGPELDVMAPGVSIQSTLPGNKYGALNGTSMASPHVAGAAALILSKHPNWTNTQVRSSLENTTTKLGDSFYYGKGLINVQAAAQ

SEQ ID NO: 70342 - protein, 275 aa, Bacillus amyloliquefaciens
AQSVPYGVSQIKAPALHSQGYTGSNVKVAVIDSGIDSSHPDLKVAGGASMVPSETNPFQDNNSHGTHVAGTVAALNNSIGVLGVAPSASLYAVKVLNGCGSGQYSWIINGIEWAIANNMDVINMSLGGPSGSAALKAAVDKAVASGVVVVAAAGNEGTSGSSSTVGYPGKYPSVIAVGAVDSSNQRASFSSVGPELDVMAPGVSIQSTLPGNKYGALNGTSMASPHVAGAAALILSKHPNWTNTQVRSSLENTTTKLGDSFYYGKGLINVQAAAQ

SEQ ID NO: 70343 - protein, 275 aa, Bacillus sp.
AQTVPWGIPHIKADKAHAAGVTGSGVKVAILDTGIDANHADLNVKGGASFVSGEPNALQDGNGHGTHVAGTVAALDNTTGVLGVAYNADLYAVKVLSASGSGTLSGIAQGIEWSISNRMNVINMSLGHTHGSTALQQACNNAYNRGIVVIAAAGNSGSSGNRNTMDYPARYSSVIAVGAVSSNNTRASFSSVGSELEVMAPGVNILSTTPGNNYASFNGTSMAAPHVAGAAALIKAKYPSMTNVQIRNRLKNTATNLGDPFFYGKGVINVESALQ

SEQ ID NO: 70344 - protein, 275 aa, Bacillus amyloliquefaciens
AQSVPYGVSQIKAPALHSQGYTGSNVKVAVIDSGIDSSHPDLKVAGGASMVPSETNPFQDNNSHGTHVAGTVAALNNSIGVLGVAPSASLYAVKVLGSHGSGQYSWIINGIEWAIANNMDVINMSLGGPSGSAALKAAVDKAVASGVVVVAAAGNEGTSGSSSTVGYPGKYPSVIAVGAVDSSNQRASFSSVGPELDVMAPGVSIQSTLPGNKYGALNGTSMASPHVAGAAALILSKHPNWTNTQVRSSLENTTTKLGDSFYYGKGLINVQAAAQ

SEQ ID NO: 70345 - protein, 275 aa, Bacillus sp.
AQTVPWGIPHIKADKAHAAGVTGSGVKVAILDTGIDANHADLNVKGGASFVSGEPNALQDGNGHGTHVAGTVAALDNTTGVLGVAYNADLYAVKVLSASGSGTLSGIAQGIEWSISNRMNVINMSLGEGYGSTALQQACNNAYNRGIVVIAAAGNSGSSGNRNTMDYPARYSSVIAVGAVSSNNTRASFSSVGSELEVMAPGVNILSTTPGNNYASFNGTSMAAPHVAGAAALIKAKYPSMTNVQIRNRLKNTATNLGDPFFYGKGVINVESALQ

SEQ ID NO: 70346 - protein, 275 aa, Bacillus sp.
AQTVPWGIPHIKADKAHAAGVTGSGVKVAILDTGIDANHADLNVKGGASFVSDEPNALQDGNGHGTHVAGTVAALNNTTGVLGVAYNADLYAVKVLSASGSGTLSGIAQGIEWSISNGMNVINMSLGGSSGSTALQQACNNAYNRGIVVIAAAGNSGSSGNRNTMDYPARYSSVIAVGAVSSNNTRASFSSVGSELEVMAPGVNILSTTPGNNYASFNGTSMAAPHVAGAAALIKAKYPSMTNVQIRERLKNTATNLGDPFFYGKGVINVEKALQ

SEQ ID NO: 70347 - protein, 275 aa, Bacillus amyloliquefaciens
AQSVPYGVSQIKAPALHSQGYTGSNVKVAVIDSGIDSSHPDLKVAGGASMVPSETNPFQDNNSHGTHVAGTVAALNNSIGVLGVAPSASLYAVKVLGADGSGSYSWIINGIEWAIANNMDVINMSLGGPSGSAALKAAVDKAVASGVVVVAAAGNEGTSGSSSTVGYPGKYPSVIAVGAVDSSNQRASFSSVGPELDVMAPGVSIQSTLPGNKYGALNGTSMASPHVAGAAALILSKHPNWTNTQVRSSLENTTTKLGDSFYYGKGLINVQAAAQ

SEQ ID NO: 70348 - protein, 275 aa, Bacillus sp.
AQTVPWGIPHIKADKAHAAGVTGSGVKVAILDTGIDANHADLNVKGGASFVSGEPNALQDGNGHGTHVAGTVAALDNTTGVLGVAYNADLYAVKVLSASGSGTLSGIAQGIEWSISNRMNVINMSLGDKHGSTALQQACNNAYNRGIVVIAAAGNSGSSGNRNTMDYPARYSSVIAVGAVSSNNTRASFSSVGSELEVMAPGVNILSTTPGNNYASFNGTSMAAPHVAGAAALIKAKYPSMTNVQIRNRLKNTATNLGDPFFYGKGVINVESALQ

SEQ ID NO: 70349 - protein, 274 aa, Bacillus amyloliquefaciens
AQSVPYGVSQIKAPALHSQGYTGSNVKVAVIDSGIDSSHPDLKVAGGASMVPGESAFQDNNSHGTHVAGTVAALNNSIGVLGVAPSASLYAVKVLDADGSGQYSWIINGIEWAIANNMDVINMSLGGPSGSAALKAAVDKAVASGVVVVAAAGNEGTSGSSSTVGYPGKYPSVIAVGAVDSSNQRASFSSVGPELDVMAPGVSIQSTLPGNKYGALNGTSMASPHVAGAAALILSKHPNWTNTQVRSSLENTTTKLGDSFYYGKGLINVQAAAQ

SEQ ID NO: 70350 - protein, 275 aa, Bacillus amyloliquefaciens
AQSVPYGVSQIKAPALHSQGYTGSNVKVAVIDSGIDSSHPDLKVAGGASMVPSETNPFQDNNSHGTHVAGTVAALNNSIGVLGVAPSASLYAVKVLGSVGSGQYSWIINGIEWAIANNMDVINMSLGGPSGSAALKAAVDKAVASGVVVVAAAGNEGTSGSSSTVGYPGKYPSVIAVGAVDSSNQRASFSSVGPELDVMAPGVSIQSTLPGNKYGALNGTSMASPHVAGAAALILSKHPNWTNTQVRSSLENTTTKLGDSFYYGKGLINVQAAAQ

SEQ ID NO: 70351 - protein, 275 aa, Bacillus amyloliquefaciens
AQSVPYGVSQIKAPALHSQGYTGSNVKVAVIDSGIDSSHPDLKVAGGASMVPSETNPFQDNNSHGTHVAGTVAALNNSIGVLGVAPSASLYAVKVLGGGGSGQYSWIINGIEWAIANNMDVINMSLGGPSGSAALKAAVDKAVASGVVVVAAAGNEGTSGSSSTVGYPGKYPSVIAVGAVDSSNQRASFSSVGPELDVMAPGVSIQSTLPGNKYGALNGTSMASPHVAGAAALILSKHPNWTNSQVRSSLENTTTKLGDSFYYGKGLINVQAAAQ

SEQ ID NO: 70352 - protein, 275 aa, Bacillus sp.
AQTVPWGIPHIKADKAHAAGVTGSGVKVAILDTGIDANHADLNVKGGASFVSGEPNALQDGNGHGTHVAGTVAALDNTTGVLGVAYNADLYAVKVLSASGSGTLSGIAQGIEWSISNRMNVINMSLGDRIGSTALQQACNNAYNRGIVVIAAAGNSGSSGNRNTMDYPARYSSVIAVGAVSSNNTRASFSSVGSELEVMAPGVNILSTTPGNNYASFNGTSMAAPHVAGAAALIKAKYPSMTNVQIRNRLKNTATNLGDPFFYGKGVINVESALQ

SEQ ID NO: 70353 - protein, 275 aa, Bacillus sp.
AQTVPWGIPHIKADKAHAAGVTGSGVKVAILDTGIDANHADLNVKGGASFVSGEPNALQDGNGHGTHVAGTVAALDNTTGVLGVAYNADLYAVKVLSASGSGTLSGIAQGIEWSISNRMNVINMSLGYVMGSTALQQACNNAYNRGIVVIAAAGNSGSSGNRNTMDYPARYSSVIAVGAVSSNNTRASFSSVGSELEVMAPGVNILSTTPGNNYASFNGTSMAAPHVAGAAALIKAKYPSMTNVQIRNRLKNTATNLGDPFFYGKGVINVESALQ

SEQ ID NO: 70354 - protein, 275 aa, Bacillus sp.
AQTVPWGIPHIKADKAHAAGVTGSGVKVAILDTGIDANHADLNVKGGASFVSGEPNALQDGNGHGTHVAGTVAALDNTTGVLGVAYNADLYAVKVLSASGSGTLSGIAQGIEWSISNRMNVINMSLGVMHGSTALQQACNNAYNRGIVVIAAAGNSGSSGNRNTMDYPARYSSVIAVGAVSSNNTRASFSSVGSELEVMAPGVNILSTTPGNNYASFNGTSMAAPHVAGAAALIKAKYPSMTNVQIRNRLKNTATNLGDPFFYGKGVINVESALQ

SEQ ID NO: 70355 - protein, 275 aa, Bacillus amyloliquefaciens
AQSVPYGVSQIKAPALHSQGYTGGNVKVAVLDTGIDSSHPDLKVAGGASMVPGETNPFQDNNGHGTHVAGTVAALNNNIGVLGVAPSASLYAVKVLGADGNGQYSWIIGGIEWAIANNMDVINMSLGSPSGSAALKAAVDKAVASGVVVVAAAGNEGTSGSSSTVGYPAKYPSVIAVGAVDSSNQRASFSSVGPELDVMAPGVSIQSTLPGNKYGAQSGTSMASPHVAGAAALILSKHPNWTVTQVRSSLENTTTKLGDSFYYGKGLINVQAAAQ

SEQ ID NO: 70356 - protein, 275 aa, Bacillus amyloliquefaciens
AQSVPYGVSQIKAPALHSQGYTGSNVKVAVIDSGIDSSHPDLKVAGGASMVPSETNPFQDNNSHGTHVAGTVAALNNSIGVLGVAPSASLYAVKVLNRVGSGQYSWIINGIEWAIANNMDVINMSLGGPSGSAALKAAVDKAVASGVVVVAAAGNEGTSGSSSTVGYPGKYPSVIAVGAVDSSNQRASFSSVGPELDVMAPGVSIQSTLPGNKYGALNGTSMASPHVAGAAALILSKHPNWTNTQVRSSLENTTTKLGDSFYYGKGLINVQAAAQ

SEQ ID NO: 70357 - protein, 275 aa, Bacillus sp.
AQTVPWGIPHIKADKAHAAGVTGSGVKVAILDTGIDANHADLNVKGGASFVTGEPNALQDGNGHGTHVAGTVAALDNTTGVLGVAYNADLYAVKVLSASGSGTLSGIAQGIEWSISNRMNVINMSLGDFYGSTALQQACNNAYNRGIVVIAAAGNSGSSGNRNTMDYPARYSSVIAVGAVSSNNTRASFSSVGSELEVMAPGVNILSTTPGNNYASRNGTSMAAPHVAGAAALIKAKYPSMTNVQIRNRLKNTATNLGDPFFYGKGVINVEKALQ

SEQ ID NO: 70358 - protein, 276 aa, Bacillus amyloliquefaciens
AQSVPYGVSQIKAPALHSQGYTGSNVKVAVIDSGIDSSHPDLKVAGGASMVPSETNPFQDNNSHGTHVAGTVAALNNSIGVLGVAPSASLYAVKVLGASDGSGQYSWIINGIEWAIANNMDVINMSLGGPSGSAALKAAVDKAVASGVVVVAAAGNEGTSGSSSTVGYPGKYPSVIAVGAVDSSNQRASFSSVGPELDVMAPGVSIQSTLPGNKYGALNGTSMASPHVAGAAALILSKHPNWTNTQVRSSLENTTTKLGDSFYYGKGLINVQAAAQ

SEQ ID NO: 70359 - protein, 275 aa, Bacillus sp.
AQTVPWGIPHIKADKAHAAGVTGSGVKVAILDTGIDANHADLNVKGGASFVTGEPNALQDGNGHGTHVAGTVAALDNTTGVLGVAYNADLYAVKVLSASGSGTLSGIAQGIEWSISNRMNVINMSLGDFYGSTALQQACNNAYNRGIVVIAAAGNSGSSGNRNTMDYPARYSSVIAVGAVSSNNTRASFSSVGSELEVMAPGVNILSTTPGNNYASRNGTSMAAPHVAGAAALIKAKYPSMTNVQIRNRLKNTATRLGDPFFYGKGVINVESALQ

SEQ ID NO: 70360 - protein, 275 aa, Bacillus sp.
AQTVPWGIPHIKADKAHAAGVTGSGVKVAILDTGIDANHADLNVKGGASFVSGEPNALQDGNGHGTHVAGTVAALDNTTGVLGVAYNADLYAVKVLSASGSGTLSGIAQGIEWSISNRMNVINMSLGSNVGSTALQQACNNAYNRGIVVIAAAGNSGSSGNRNTMDYPARYSSVIAVGAVSSNNTRASFSSVGSELEVMAPGVNILSTTPGNNYASFNGTSMAAPHVAGAAALIKAKYPSMTNVQIRNRLKNTATNLGDPFFYGKGVINVESALQ

SEQ ID NO: 70361 - protein, 275 aa, Bacillus sp.
AQTVPWGIPHIKADKAHAAGVTGSGVKVAILDTGIDANHADLNVKGGASFVSGEPNALQDGNGHGTHVAGTVAALNNTTGVLGVAYNADLYAVKVLSASGSGTLSGIAQGIEWSISNGMNVINMSLGGSSGSTALQQACNNAYNRGIVVIAAAGNSGSDGNRNTMHYPARYSSVIAVGAVSSNNTRASFSSVGSELEVMAPGVNILSTTPGNNYASFNGTSMAAPHVAGAAALIKAKYPSMTNVQIRERLKNTATNLGDPFFYGKGVINVESALQ

SEQ ID NO: 70362 - protein, 275 aa, Bacillus amyloliquefaciens
AQSVPYGVSQIKAPALHSQGYTGSNVKVAVIDSGIDSSHPDLKVAGGASMVPSETNPFQDNNSHGTHVAGTVAALNNSIGVLGVAPSASLYAVKVLGCSGSGQYSWIINGIEWAIANNMDVINMSLGGPSGSAALKAAVDKAVASGVVVVAAAGNEGTSGSSSTVGYPGKYPSVIAVGAVDSSNQRASFSSVGPELDVMAPGVSIQSTLPGNKYGALNGTSMASPHVAGAAALILSKHPNWTNTQVRSSLENTTTKLGDSFYYGKGLINVQAAAQ

SEQ ID NO: 70363 - protein, 275 aa, Bacillus amyloliquefaciens
AQSVPYGVSQIKAPALHSQGYTGSNVKVAVIDSGIDSSHPDLKVAGGASMVPSETNPFQDNNSHGTHVAGTVAALNNSIGVLGVAPSASLYAVKVLNGRGSGQYSWIINGIEWAIANNMDVINMSLGGPSGSAALKAAVDKAVASGVVVVAAAGNEGTSGSSSTVGYPGKYPSVIAVGAVDSSNQRASFSSVGPELDVMAPGVSIQSTLPGNKYGALNGTSMASPHVAGAAALILSKHPNWTNTQVRSSLENTTTKLGDSFYYGKGLINVQAAAQ

SEQ ID NO: 70364 - protein, 275 aa, Bacillus amyloliquefaciens
AQSVPYGVSQIKAPALHSQGYTGSNVKVAVIDSGIDSSHPDLKVAGGASMVPSETNPFQDNNSHGTHVAGTVAALNNSIGVLGVAPSASLYAVKVLRSRGSGQYSWIINGIEWAIANNMDVINMSLGGPSGSAALKAAVDKAVASGVVVVAAAGNEGTSGSSSTVGYPGKYPSVIAVGAVDSSNQRASFSSVGPELDVMAPGVSIQSTLPGNKYGALNGTSMASPHVAGAAALILSKHPNWTNTQVRSSLENTTTKLGDSFYYGKGLINVQAAAQ

SEQ ID NO: 70365 - protein, 275 aa, Bacillus amyloliquefaciens
AQSVPYGVSQIKAPALHSQGYTGSNVKVAVIDSGIDSSHPDLKVVGGASMVPSETNPFQDNNSHGTHVAGTVAALNNSIGVLGVAPSASLYAVKVLGADGSGQYSWIINGIEWAIANNMDVINMSLGGPSGSAALKAAVDKAVASGVVVVAAAGNEGTSGSSSTVGYPGKYPSVIAVGAVDSSNQRASFSSVGPELDVMAPGVSIQSTLPGNKYGALNGTSMASPHVAGAAALILSKHPNWTNTQVRSSLENTTTKLGDSFYYGKGLINVQAAAQ

SEQ ID NO: 70366 - protein, 275 aa, Bacillus sp.
AQTVPWGIPHIKADKAHAAGVTGSGVKVAILDTGIDANHADLNVKGGASFVSGEPNALQDGNGHGTHVAGTVAALDNTTGVLGVAYNADLYAVKVLSASGSGTLSGIAQGIEWSISNRMNVINMSLGSHQGSTALQQACNNAYNRGIVVIAAAGNSGSSGNRNTMDYPARYSSVIAVGAVSSNNTRASFSSVGSELEVMAPGVNILSTTPGNNYASFNGTSMAAPHVAGAAALIKAKYPSMTNVQIRNRLKNTATNLGDPFFYGKGVINVESALQ

SEQ ID NO: 70367 - protein, 275 aa, Bacillus sp.
AQTVPWGIPHIKADKAHAAGVTGSGVKVAILDTGIDANHADLNVKGGASFVSGEPNALQDGNGHGTHVAGTVAALDNTTGVLGVAYNADLYAVKVLSASGSGTLSGIAQGIEWSISNRMNVINMSLGHMYGSTALQQACNNAYNRGIVVIAAAGNSGSSGNRNTMDYPARYSSVIAVGAVSSNNTRASFSSVGSELEVMAPGVNILSTTPGNNYASFNGTSMAAPHVAGAAALIKAKYPSMTNVQIRNRLKNTATNLGDPFFYGKGVINVESALQ

SEQ ID NO: 70368 - protein, 275 aa, Bacillus amyloliquefaciens
AQSVPYGVSQIKAPALHSQGYTGSNVKVAVIDSGIDSSHPDLKVAGGASMVPSETNPFQDNNSHGTHVAGTVAALNNSIGVLGVAPSASLYAVKVLNHNGSGQYSWIINGIEWAIANNMDVINMSLGGPSGSAALKAAVDKAVASGVVVVAAAGNEGTSGSSSTVGYPGKYPSVIAVGAVDSSNQRASFSSVGPELDVMAPGVSIQSTLPGNKYGALNGTSMASPHVAGAAALILSKHPNWTNTQVRSSLENTTTKLGDSFYYGKGLINVQAAAQ

SEQ ID NO: 70369 - protein, 275 aa, Bacillus amyloliquefaciens
AQSVPYGVSQIKAPALHSQGYTGSNVKVAVIDSGIDSSHPDLKVAGGASMVPSETNPFQDNNSHGTHVAGTVAALNNSIGVLGVAPSASLYAVKVLGSGGSGQYSWIINGIEWAIANNMDVINMSLGGPSGSAALKAAVDKAVASGVVVVAAAGNEGTSGSSSTVGYPGKYPSVIAVGAVDSSNQRASFSSVGPELDVMAPGVSIQSTLPGNKYGALNGTSMASPHVAGAAALILSKHPNWTNTQVRSSLENTTTKLGDSFYYGKGLINVQAAAQ

SEQ ID NO: 70370 - protein, 275 aa, Bacillus amyloliquefaciens
AQSVPYGVSQIKAPALHSQGYTGSNVKVAVIDSGIDSSHPDLKVAGGASMVPSETNPFQDNNSHGTHVAGTVAALNNSIGVLGVAPSASLYAVKVLRSGGSGQYSWIINGIEWAIANNMDVINMSLGGPSGSAALKAAVDKAVASGVVVVAAAGNEGTSGSSSTVGYPGKYPSVIAVGAVDSSNQRASFSSVGPELDVMAPGVSIQSTLPGNKYGALNGTSMASPHVAGAAALILSKHPNWTNTQVRSSLENTTTKLGDSFYYGKGLINVQAAAQ

SEQ ID NO: 70371 - protein, 275 aa, Bacillus sp.
AQTVPWGIPHIKADKAHAAGVTGSGVKVAILDTGIDANHADLNVKGGASFVSGEPNALQDGNGHGTHVAGTVAALDNTTGVLGVAYNADLYAVKVLSASGSGTLSGIAQGIEWSISNRMNVINMSLGHKWGSTALQQACNNAYNRGIVVIAAAGNSGSSGNRNTMDYPARYSSVIAVGAVSSNNTRASFSSVGSELEVMAPGVNILSTTPGNNYASFNGTSMAAPHVAGAAALIKAKYPSMTNVQIRNRLKNTATNLGDPFFYGKGVINVESALQ

SEQ ID NO: 70372 - protein, 275 aa, Synthetic construct
AQVVPWGIPHIKADKAHASGVTGSGVKVAVLDTGIDANHADLNVKGGASFVSGEPNALQDGNGHGTHVSGTVAALDNTTGVLGVAYNAFLYAVKVLGASGSGTLSGIAQGIEWSIANDMDVINMSLGISTGSTALQQACNNAYASGIVVVAAAGNSGSNGKRNTMGYPARYSSVIAVGAVDSSNNRASFSSVGSELEVMAPGVSILSTTPGNNYESFNGTSMASPHVAGAAALIKAKYPSMTNVQIRNKLKNTATNLGDAFYYGHGVINVEKALQ

SEQ ID NO: 70373 - protein, 275 aa, Bacillus sp.
AQTVPWGIPHIKADKAHAAGVTGSGVKVAILDTGIDANHADLNVKGGASFVSGEPNALQDGNGHGTHVAGTVAALNNTTGVLGVAYNADLYAVKVLSASGSGTLSGIAQGIEWSISNRMNVINMSLGGSSGSTALQQACNNAYNRGIVVIAAAGNSGSSGNRNTMDYPARYSSVIAVGAVSSNNTRASFSSVGSELEVMAPGVNILSTTPGNNYASFNGTSMAAPHVAGAAALIKAKYPSMTNVQIRERLKNTATRLGDPFFYGKGVINVEKALQ

SEQ ID NO: 70374 - protein, 275 aa, Bacillus sp.
AQTVPWGIPHIKADKAHAAGVTGSGVKVAILDTGIDANHADLNVKGGASFVSGEPNALQDGNGHGTHVAGTVAALNNTTGVLGVAYNADLYAVKVLSASGSGTLSGIAQGIEWSISNGMNVINMSLGVMHGSTALQQACNNAYNRGIVVIAAAGNSGSSGNRNTMDYPARYSSVIAVGAVSSNNTRASFSSVGSELEVMAPGVNILSTTPGNNYASFNGTSMAAPHVAGAAALIKAKYPSMTNVQIRNRLKNTATNLGDPFFYGKGVINVESALQ

SEQ ID NO: 70375 - protein, 276 aa, Bacillus amyloliquefaciens
AQSVPYGVSQIKAPALHSQGYTGSNVKVAVIDSGIDSSHPDLKVAGGASMVPSETNPFQDNNSHGTHVAGTVAALNNSIGVLGVAPSASLYAVKVLDGSLGSGQYSWIINGIEWAIANNMDVINMSLGGPSGSAALKAAVDKAVASGVVVVAAAGNEGTSGSSSTVGYPGKYPSVIAVGAVDSSNQRASFSSVGPELDVMAPGVSIQSTLPGNKYGALNGTSMASPHVAGAAALILSKHPNWTNTQVRSSLENTTTKLGDSFYYGKGLINVQAAAQ

SEQ ID NO: 70376 - protein, 275 aa, Bacillus sp.
AQTVPWGIPHIKADKAHAAGVTGSGVKVAILDTGIDANHADLNVKGGASFVSGEPNALQDGNGHGTHVAGTVAALNNTTGVLGVAYNADLYAVKVLSASASGTLSGIAQGIEWSISNGMNVINMSLGHFSGSTALQQACNNAYNRGIVVIAAAGNSGSSGNRNTMGYPARYSSVIAVGAVSSNNTRASFSSVGSELEVMAPGVNILSTTPGNNYASFNGTSMAAPHVAGAAALIKAKYPSMTNVQIRERLKNTATNLGDPFFYGKGVINVEKALQ

SEQ ID NO: 70377 - protein, 275 aa, Synthetic construct
AQVVPWGIPHIKADKAHASGVTGSGVKVAVLDTGIDANHADLNVKGGASFVSGEPNALQDGNGHGTHVAGTVAALDNTTGVLGVAYNAFLYAVKVLGASGSGTLSGIAQGIEWSIANDMDVINMSLGISTGSTALQQACNNAYASGIVVVAAAGNSGSNGKRNTMGYPARYSSVIAVGAVDSSNNRASFSSVGSELEVMAPGVSILSTTPGNNYESFSGTSMASPHVAGAAALIKAKYPSMTNVQIRNKLKNTATNLGDAFYYGHGVINVEKALQ

SEQ ID NO: 70378 - protein, 275 aa, Bacillus sp.
AQTVPWGIPHIKADKAHAAGVTGSGVKVAILDTGIDANHADLNVKGGASFVSGEPNALQDGNGHGTHVAGTVAALDNTTGVLGVAYNADLYAVKVLSASGSGTLSGIAQGIEWSISNRMNVINMSLGNGNGSTALQQACNNAYNRGIVVIAAAGNSGSSGNRNTMDYPARYSSVIAVGAVSSNNTRASFSSVGSELEVMAPGVNILSTTPGNNYASFNGTSMAAPHVAGAAALIKAKYPSMTNVQIRNRLKNTATNLGDPFFYGKGVINVESALQ

SEQ ID NO: 70379 - protein, 276 aa, Bacillus amyloliquefaciens
AQSVPYGVSQIKAPALHSQGYTGSNVKVAVIDSGIDSSHPDLKVAGGASMVPSETNPFQDNNSHGTHVAGTVAALNNSIGVLGVAPSASLYAVKVLGASCGSGQYSWIINGIEWAIANNMDVINMSLGGPSGSAALKAAVDKAVASGVVVVAAAGNEGTSGSSSTVGYPGKYPSVIAVGAVDSSNQRASFSSVGPELDVMAPGVSIQSTLPGNKYGALNGTSMASPHVAGAAALILSKHPNWTNTQVRSSLENTTTKLGDSFYYGKGLINVQAAAQ

SEQ ID NO: 70380 - protein, 275 aa, Bacillus amyloliquefaciens
AQSVPYGVSQIKAPALHSQGYTGSNVKVAVIDSGIDSSHPDLKVAGGASMVPGESXAFQDNNSHGTHVAGTVAALNNSIGVLGVAPSASLYAVKVLDADGSGQYSWIINGIEWAIANNMDVINMSLGGPSGSAALKAAVDKAVASGVVVVAAAGNEGTSGSSSTVGYPGKYPSVIAVGAVDSSNQRASFSSVGPELDVMAPGVSIQSTLPGNKYGALNGTSMASPHVAGAAALILSKHPNWTNTQVRSSLENTTTKLGDSFYYGKGLINVQAAAQ

SEQ ID NO: 70381 - protein, 275 aa, Bacillus sp.
AQTVPWGIPHIKADKAHAAGVTGSGVKVAILDTGIDANHADLNVKGGASFVSGEPNALQDGNGHGTHVAGTVAALDNTTGVLGVAYNADLYAVKVLSASGSGTLSGIAQGIEWSISNRMNVINMSLGDFYGSTALQQACNNAYNRGIVVIAAAGNSGSSGNRNTMDYPARYSSVIAVGAVSSNNTRASFSSVGSELEVMAPGVNILSTTPGNNYASRNGTSMAAPHVAGAAALIKAKYPSMTNVQIRNRLKNTATELGDPFFYGKGVINVESALQ

SEQ ID NO: 70382 - protein, 274 aa, Bacillus amyloliquefaciens
AQSVPYGVSQIKAPALYSQGYTGSNVKVAVIDSGIDSSHPDLKVAGGASMVPGESAFQDNNSHGTHVAGTVAALNNSIGVLGVAPSASLYAVKVLGADGSGQYSWIINGIEWAIANNMDVINMSLGGPSGSAALKAAVDKAVASGVVVVAAAGNEGTSGSSSTVGYPGKYPSVIAVGAVDSSNQRASFSSVGPELDVMAPGVSIQSTLPGNKYGALNGTSMASPHVAGAAALILSKHPNWTNTQVRSSLENTTTKLGDSFYYGKGLINVQAAAQ

SEQ ID NO: 70383 - protein, 275 aa, Bacillus amyloliquefaciens
AQSVPYGVSQIKAPALHSQGYTGSNVKVAVIDSGIDSSHPDLKVAGGASMVPGESXAFQDNNSHGTHVAGTVAALNNSIGVLGVAPSASLYAVKVLGTDGSGQYSWIINGIEWAIANNMDVINMSLGGPSGSAALKAAVDKAVASGVVVVAAAGNEGTSGSSSTVGYPGKYPSVIAVGAVDSSNQRASFSSVGPELDVMAPGVSIQSTLPGNKYGALNGTSMASPHVAGAAALILSKHPNWTNTQVRSSLENTTTKLGDSFYYGKGLINVQAAAQ

SEQ ID NO: 70384 - protein, 275 aa, Bacillus sp.
AQTVPWGIPHIKADKAHAAGVTGSGVKVAILDTGIDANHADLNVKGGASFVSGEPNALQDGNGHGTHVAGTVAALDNTTGVLGVAYNADLYAVKVLSASGSGTLSGIAQGIEWSISNRMNVINMSLGYPDGSTALQQACNNAYNRGIVVIAAAGNSGSSGNRNTMDYPARYSSVIAVGAVSSNNTRASFSSVGSELEVMAPGVNILSTTPGNNYASFNGTSMAAPHVAGAAALIKAKYPSMTNVQIRNRLKNTATNLGDPFFYGKGVINVESALQ

SEQ ID NO: 70385 - protein, 275 aa, Bacillus sp.
AQTVPWGIPHIKADKAHAAGVTGSGVKVAILDTGIDANHADLNVKGGASFVSGEPNALQDGNGHGTHVAGTVAALDNTTGVLGVAYNADLYAVKVLSASGSGTLSGIAQGIEWSISNRMNVINMSLGSIRGSTALQQACNNAYNRGIVVIAAAGNSGSSGNRNTMDYPARYSSVIAVGAVSSNNTRASFSSVGSELEVMAPGVNILSTTPGNNYASFNGTSMAAPHVAGAAALIKAKYPSMTNVQIRNRLKNTATNLGDPFFYGKGVINVESALQ

SEQ ID NO: 70386 - protein, 274 aa, Bacillus amyloliquefaciens
AQSVPYGVSQIKATALHSQGYTGSNVKVAVIDSGIDSSHPDLKVAGGASMVPGESPFQDNNSHGTHVAGTVAALNNSIGVLGVAPSASLYAVKVLGADGSGQYSWIINGIEWAIANNMDVINMSLGGPSGSAALKAAVDKAVASGVVVVAAAGNEGTSGSSSTVGYPGKYPSVIAVGAVDSSNQRASFSSVGPELDVMAPGVSIQSTLPGNKYGALNGTSMASPHVAGAAALILSKHPNWTNTQVRSSLENTTTKLGDSFYYGKGLINVQAAAQ

SEQ ID NO: 70387 - protein, 275 aa, Bacillus sp.
AQTVPWGIPHIKADKAHAAGVTGSGVKVAILDTGIDANHADLNVKGGASFVSGEPNALQDGNGHGTHVAGTVAALDNTTGVLGVAYNADLYAVKVLSASGSGTLSGIAQGIEWSISNRMNVINMSLGQRNGSTALQQACNNAYNRGIVVIAAAGNSGSSGNRNTMDYPARYSSVIAVGAVSSNNTRASFSSVGSELEVMAPGVNILSTTPGNNYASFNGTSMAAPHVAGAAALIKAKYPSMTNVQIRNRLKNTATNLGDPFFYGKGVINVESALQ

SEQ ID NO: 70388 - protein, 275 aa, Bacillus amyloliquefaciens
AQSVPYGVSQIKAPALHSQGYTGSNVKVAVIDSGIDSSHPDLKVAGGASMVPSETNPFQDNNSHGTHVAGTVAALNNSIGVLGVAPSASLYAVKVLCDSGSGQYSWIINGIEWAIANNMDVINMSLGGPSGSAALKAAVDKAVASGVVVVAAAGNEGTSGSSSTVGYPGKYPSVIAVGAVDSSNQRASFSSVGPELDVMAPGVSIQSTLPGNKYGALNGTSMASPHVAGAAALILSKHPNWTNTQVRSSLENTTTKLGDSFYYGKGLINVQAAAQ

SEQ ID NO: 70389 - protein, 274 aa, Bacillus amyloliquefaciens
AQSVPYGVSQIKATALHSQGYTGSNVKVAVIDSGIDSSHPDLKVAGGASMVPGESAFQDNNSHGTHVAGTVAALNNSIGVLGVAPSASLYAVKVLGADGSGQYSWIINGIEWAIANNMDVINMSLGGPSGSAALKAAVDKAVASGVVVVAAAGNEGTSGSSSTVGYPGKYPSVIAVGAVDSSNQRASFSSVGPELDVMAPGVSIQSTLPGNKYGALNGTSMASPHVAGAAALILSKHPNWTNTQVRSSLENTTTKLGDSFYYGKGLINVQAAAQ

SEQ ID NO: 70390 - protein, 275 aa, Bacillus sp.
AQTVPWGIPHIKADKAHAAGVTGSGVKVAILDTGIDANHADLNVKGGASFVSGEPNALQDGNGHGTHVAGTVAALDNTTGVLGVAYNADLYAVKVLSASGSGTLSGIAQGIEWSISNRMNVINMSLGSPAGSTALQQACNNAYNRGIVVIAAAGNSGSSGNRNTMDYPARYSSVIAVGAVSSNNTRASFSSVGSELEVMAPGVNILSTTPGNNYASFNGTSMAAPHVAGAAALIKAKYPSMTNVQIRNRLKNTATNLGDPFFYGKGVINVESALQ

SEQ ID NO: 70391 - protein, 275 aa, Bacillus amyloliquefaciens
AQSVPYGVSQIKAPALHSQGYTGSNVKVAVIDSGIDSSHPDLKVAGGASMVPSETNPFQDNNSHGTHVAGTVAALNNSIGVLGVAPSASLYAVKVLRGSGSGQYSWIINGIEWAIANNMDVINMSLGGPSGSDALKAAVDKAVASGVVVVAAAGNEGTSGSSSTVGYPGKYPSVIAVGAVDSSNQRASFSSVGPELDVMAPGVSIQSTLPGNKYGALNGTSMASPHVAGAAALILSKHPNWTNTQVRSSLENTTTKLGDSFYYGKGLINVQAAAQ

SEQ ID NO: 70392 - protein, 274 aa, Bacillus amyloliquefaciens
AQSVPYGVSQIKATALHSQGYTGSNVKVAVIDSGIDSSHPDLKVAGGASMVPGETAFQDNNSHGTHVAGTVAALNNSIGVLGVAPSASLYAVKVLGADGSGQYSWIINGIEWAIANNMDVINMSLGGPSGSAALKAAVDKAVASGVVVVAAAGNEGTSGSSSTVGYPGKYPSVIAVGAVDSSNQRASFSSVGPELDVMAPGVSIQSTLPGNKYGALNGTSMASPHVAGAAALILSKHPNWTNTQVRSSLENTTTKLGDSFYYGKGLINVQAAAQ

SEQ ID NO: 70393 - protein, 276 aa, Bacillus amyloliquefaciens
AQSVPYGVSQIKAPALHSQGYTGSNVKVAVIDSGIDSSHPDLKVAGGASMVPSETNPFQDNNSHGTHVAGTVAALNNSIGVLGVAPSASLYAVKVLGAISGSGQYSWIINGIEWAIANNMDVINMSLGGPSGSAALKAAVDKAVASGVVVVAAAGNEGTSGSSSTVGYPGKYPSVIAVGAVDSSNQRASFSSVGPELDVMAPGVSIQSTLPGNKYGALNGTSMASPHVAGAAALILSKHPNWTNTQVRSSLENTTTKLGDSFYYGKGLINVQAAAQ

SEQ ID NO: 70394 - protein, 276 aa, Bacillus amyloliquefaciens
AQSVPYGVSQIKAPALHSQGYTGSNVKVAVIDSGIDSSHPDLKVAGGASMVPSETNPFQDNNSHGTHVAGTVAALNNSIGVLGVAPSASLYAVKVLGASNGSGQYSWIINGIEWAIANNMDVINMSLGGPSGSAALKAAVDKAVASGVVVVAAAGNEGTSGSSSTVGYPGKYPSVIAVGAVDSSNQRASFSSVGPELDVMAPGVSIQSTLPGNKYGALNGTSMASPHVAGAAALILSKHPNWTNTQVRSSLENTTTKLGDSFYYGKGLINVQAAAQ

SEQ ID NO: 70395 - protein, 275 aa, Bacillus amyloliquefaciens
AQSVPYGVSQIKAPALHSQGYTGSNVKVAVIDSGIDSSHPDLKVAGGASMVPSETNPFQDNNSHGTHVAGTVAALNNSIGVLGVAPSASLYAVKVLCGSGSGQYSWIINGIEWAIANNMDVINMSLGGPSGSAALKAAVDKAVASGVVVVAAAGNEGTSGSSSTVGYPGKYPSVIAVGAVDSSNQRASFSSVGPELDVMAPGVSIQSTLPGNKYGALNGTSMASPHVAGAAALILSKHPNWTNTQVRSSLENTTTKLGDSFYYGKGLINVQAAAQ

SEQ ID NO: 70396 - protein, 275 aa, Bacillus amyloliquefaciens
AQSVPYGVSQIKAPALHSQGYTGSNVKVAVIDSGIDSSHPDLKVAGGASMVPSETNPFQDNNSHGTHVAGTVAALNNSIGVLGVAPSASLYAVKVLDRSGSGQYSWIINGIEWAIANNMDVINMSLGGPSGSAALKAAVDKAVASGVVVVAAAGNEGTSGSSSTVGYPGKYPSVIAVGAVDSSNQRASFSSVGPELDVMAPGVSIQSTLPGNKYGALNGTSMASPHVAGAAALILSKHPNWTNTQVRSSLENTTTKLGDSFYYGKGLINVQAAAQ

SEQ ID NO: 70397 - protein, 275 aa, Bacillus sp.
AQTVPWGIPHIKADKAHAAGVTGSGVKVAILDTGIDANHADLNVKGGASFVSGEPNALQDGNGHGTHVAGTVAALNNTTGVLGVAYNADLYAVKVLSASGSGTLSGIAQGIEWSISNGMNVINMSLGTHDGSTALQQACNNAYNRGIVVIAAAGNSGSSGNRNTMDYPARYSSVIAVGAVSSNNTRASFSSVGSELEVMAPGVNILSTTPGNNYASFNGTSMAAPHVAGAAALIKAKYPSMTNVQIRNRLKNTATNLGDPFFYGKGVINVESALQ

SEQ ID NO: 70398 - protein, 275 aa, Bacillus sp.
AQTVPWGIPHIKADKAHAAGVTGSGVKVAILDTGIDANHADLNVKGGASFVSGEPNALQDGNGHGTHVAGTVAALDNTTGVLGVAYNADLYAVKVLSASGSGTLSGIAQGIEWSISNRMNVINMSLGDRTGSTALQQACNNAYNRGIVVIAAAGNSGSSGNRNTMDYPARYSSVIAVGAVSSNNTRASFSSVGSELEVMAPGVNILSTTPGNNYASFNGTSMAAPHVAGAAALIKAKYPSMTNVQIRNRLKNTATNLGDPFFYGKGVINVESALQ

SEQ ID NO: 70399 - protein, 275 aa, unidentified
AQVVPWGIPHIKADKAHASGVTGSGVKVAVLDTGIDANHADLNVKGGASFVSGEPNALQDGNGHGTHVAGTVAALNNTTGVLGVAYNAFLYAVKVLGASGSGTLSGIAQGIEWSIANDMDVINMSLGISTGSTALQQACNNAYASGIVVVAAAGNSGSNGKRNTMGYPARYSSVIAVGAVDSSNNRASFSSVGSELEVMAPGVSILSTTPGNNYESFNGTSMASPHVAGAAALIKAKYPSMTNVQIRNKLKNTATNLGDAFYYGHGVINVEKALQ

SEQ ID NO: 70400 - protein, 274 aa, Bacillus sp.
AQTVPWGIPHIKADKAHAAGVTGSGVKVAILDTGIDANHADLNVKGGASFVSEPNALQDGNGHGTHVAGTVAALNNTTGVLGVAYNADLYAVKVLSASGSGTLSGIAQGIEWSISNGMNVINMSLGGSSGSTALQQACNNAYNRGIVVIAAAGNSGSSGNRNTMGYPARYSSVIAVGAVSSNNTRASFSSVGSELEVMAPGVNILSTTPGNNYASFNGTSMAAPHVAGAAALIKAKYPSMTNVQIRERLKNTATNLGDPFFYGKGVINVESALQ

SEQ ID NO: 70401 - protein, 275 aa, Bacillus amyloliquefaciens
AQSVPYGVSQIKAPALHSQGYTGSNVKVAVIDSGIDSSHPDLKVAGGASMVPSETNPFQDNNSHGTHVAGTVAALNNSIGVLGVAPSVSLYAVKVLGADGSGQYSWIINGIEWAIANNMDVINMSLGGSSGSAALKAAVDKAVASGVVVVAAAGNEGTSGSSSTVGYPGKYPSVIAVGAVDSSNQRASFSSVGPELDVMAPGVSIQSTLPGNKYGALNGTSMASPHVAGAAALILSKHPNWTNTQVRSSLENTTTKLGDSFYYGKGLINVQAAAQ

SEQ ID NO: 70402 - protein, 275 aa, Bacillus amyloliquefaciens
AQSVPYGVSQIKASALHSQGYTGSNVKVAVIDSGIDSSHPDLKVAGGASMVPSETNPFQDNNSHGTHVAGTVAALNNSIGVLGVAPSASLYAVKVLGSGGSGQYSWIINGIEWAIANNMDVINMSLGGPSGSAALKAAVDKAVASGVVVVAAAGNEGTSGSSSTVGYPGKYPSVIAVGAVDSSNQRASFSSVGPELDVMAPGVSIQSTLPGNKYGALNGTSMASPHVAGAAALILSKHPNWTNTQVRSSLENTTTKLGDSFYYGKGLINVQAAAQ

SEQ ID NO: 70403 - protein, 276 aa, Bacillus amyloliquefaciens
AQSVPYGVSQIKAPALHSQGYTGSNVKVAVIDSGIDSSHPDLKVAGGASMVPSETNPFQDNNSHGTHVAGTVAALNNSIGVLGVAPSASLYAVKVLGAVSGSGQYSWIINGIEWAIANNMDVINMSLGGPSGSAALKAAVDKAVASGVVVVAAAGNEGTSGSSSTVGYPGKYPSVIAVGAVDSSNQRASFSSVGPELDVMAPGVSIQSTLPGNKYGALNGTSMASPHVAGAAALILSKHPNWTNTQVRSSLENTTTKLGDSFYYGKGLINVQAAAQ

SEQ ID NO: 70404 - protein, 275 aa, Synthetic construct
AQVVPWGIPHIKADKAHASGVTGSGVKVAVLDTGIDANHADLNVKGGASFVSGEPNALQDGNGHGTHVAGTVAALDNTTGVLGVAYNAFLYAVKVLGASGSGTLSGIAQGIEWSIANDMDVINISLGISTGSTALQQACNNAYASGIVVVAAAGNSGSNGKRNTMGYPARYSSVIAVGAVDSSNNRASFSSVGSELEVMAPGVSILSTTPGNNYESFNGTSMASPHVAGAAALIKAKYPSMTNVQIRNKLKNTATNLGDAFYYGHGVINVEKALQ

SEQ ID NO: 70405 - protein, 275 aa, Bacillus sp.
AQTVPWGIPHIKADKAHAAGVTGSGVKVAILDTGIDANHADLNVKGGASFVSGEPNALQDGNGHGTHVAGTVAALDNTTGVLGVAYNADLYAVKVLSASGSGTLSGIAQGIEWSISNRMNVINMSLGWYDGSTALQQACNNAYNRGIVVIAAAGNSGSSGNRNTMDYPARYSSVIAVGAVSSNNTRASFSSVGSELEVMAPGVNILSTTPGNNYASFNGTSMAAPHVAGAAALIKAKYPSMTNVQIRNRLKNTATNLGDPFFYGKGVINVESALQ

SEQ ID NO: 70406 - protein, 275 aa, Bacillus sp.
AQTVPWGIPHIKADKAHAAGVTGSGVKVAILDTGIDANHADLNVKGGASFVSGEPNALQDGNGHGTHVAGTVAALDNTTGVLGVAYNADLYAVKVLSASGSGTLSGIAQGIEWSISNRMNVINMSLGDPYGSTALQQACNNAYNRGIVVIAAAGNSGSSGNRNTMDYPARYSSVIAVGAVSSNNTRASFSSVGSELEVMAPGVNILSTTPGNNYASFNGTSMAAPHVAGAAALIKAKYPSMTNVQIRNRLKNTATNLGDPFFYGKGVINVESALQ

SEQ ID NO: 70407 - protein, 275 aa, Bacillus amyloliquefaciens
AQSVPYGVSQIKAPALHSQGYTGSNVKVAVIDSGIDSSHPDLKVAGGASMVPSETNPFQDNNSHGTHVAGTVAALNNSIGVLGVAPSASLYAVKVLGADGSGQYSWIINGIEWAIANNMDVINMSLGGPSGSAALKAAVDKAVASGVVVVAAAGNEGTSGNSSTVGYPGKYPSVIAVGAVDSSNQRASFSSVGPELDVMAPGVSIQSTLPGNKYGALNGTSMASPHVAGAAALILSKHPNWTNTQVRSSLENTTTKLGDSFYYGKGLINVQAAAQ

SEQ ID NO: 70408 - protein, 276 aa, Bacillus amyloliquefaciens
AQSVPYGVSQIKAPALHSQGYTGSNVKVAVIDSGIDSSHPDLKVAGGASMVPSETNPFQDNNSHGTHVAGTVAALNNSIGVLGVAPSASLYAVKVLGAHSGSGQYSWIINGIEWAIANNMDVINMSLGGPSGSAALKAAVDKAVASGVVVVAAAGNEGTSGSSSTVGYPGKYPSVIAVGAVDSSNQRASFSSVGPELDVMAPGVSIQSTLPGNKYGALNGTSMASPHVAGAAALILSKHPNWTNTQVRSSLENTTTKLGDSFYYGKGLINVQAAAQ

SEQ ID NO: 70409 - protein, 275 aa, Bacillus sp.
AQTVPWGIPHIKADKAHAAGVTGSGVKVAILDTGIDANHADLNVKGGASFVFGEPNALQDGNGHGTHVAGTVAALDNTTGVLGVAYNADLYAVKVLSASGSGTLSGIAQGIEWSISNRMNVINMSLGDFYGSTALQQACNNAYNRGIVVIAAAGNSGSSGNRNTMHYPARYSSVIAVGAVSSNNTRASFSSVGSELEVMAPGVNILSTTPGNNYASRNGTSMAAPHVAGAAALIKAKYPSMTNVQIRNRLKNTATELGDPFFYGKGVINVEKALQ

SEQ ID NO: 70410 - protein, 275 aa, Bacillus sp.
AQTVPWGIPHIKADKAHAAGVTGSGVKVAILDTGIDANHADLNVKGGASFVSGEPNALQDGNGHGTHVAGTVAALDNTTGVLGVAYNADLYAVKVLSASGSGTLSGIAQGIEWSISNRMNVINMSLGNTQGSTALQQACNNAYNRGIVVIAAAGNSGSSGNRNTMDYPARYSSVIAVGAVSSNNTRASFSSVGSELEVMAPGVNILSTTPGNNYASFNGTSMAAPHVAGAAALIKAKYPSMTNVQIRNRLKNTATNLGDPFFYGKGVINVESALQ

SEQ ID NO: 70411 - protein, 275 aa, Bacillus sp.
AQTVPWGIPHIKADKAHAAGVTGSGVKVAILDTGIDANHADLNVQGGASFVSGEPNALQDGNGHGTHVAGTVAALNNTTGVLGVAYNADLYAVKVLSASGSGTLSGIAQGIEWSISNGMNVIDMSLGGSSGSTALQQACNNAYNRGIVVIAAAGNNGSSGNRNTMGYPARYSSVIAVGAVSSNNTRASFSSVGSELEVMAPGVNILSTFPGNNYASFNGTSMAAPHVAGAAALIKAKYPSMTNVQIRERLKNTATPLGDPFFYGKGVINVESALQ

SEQ ID NO: 70412 - protein, 275 aa, Bacillus amyloliquefaciens
AQSVPYGVSQIKAPALHSQGYTGSNVKVAVIDSGIDSSHPDLKVAGGASMVPSETNPFQDNNTHGTHVAGTVAALNNSIGVLGVAPSASLYAVKVLDRSGSGQYSWIINGIEWAIANNMDVINMSLGGPSGSAALKAAVDKAVASGVVVVAAAGNEGTSGSSSTVGYPGKYPSVIAVGAVDSSNQRASFSSVGPELDVMAPGVSIQSTLPGNKYGALNGTSMASPHVAGAAALILSKHPNWTNTQVRSSLENTTTKLGDSFYYGKGLINVQAAAQ

SEQ ID NO: 70413 - protein, 275 aa, Bacillus sp.
AQTVPWGIPHIKADKAHAAGVTGSGVKVAILDTGIDANHADLNVKGGASFVSGEPNALQDGNGHGTHVAGTVAALDNTTGVLGVAYNADLYAVKVLSASGSGTLSGIAQGIEWSISNRMNVINMSLGDMHGSTALQQACNNAYNRGIVVIAAAGNSGSSGNRNTMDYPARYSSVIAVGAVSSNNTRASFSSVGSELEVMAPGVNILSTTPGNNYASFNGTSMAAPHVAGAAALIKAKYPSMTNVQIRNRLKNTATNLGDPFFYGKGVINVESALQ

SEQ ID NO: 70414 - protein, 275 aa, Bacillus sp.
AQTVPWGIPHIKADKAHAAGVTGSGVKVAILDTGIDANHADLNVKGGASFVSGEPNALQDGNGHGTHVAGTVAALDNTTGVLGVAYNADLYAVKVLSASGSGTLSGIAQGIEWSISNRMNVINMSLGDFYGSTALQQACNNAYNRGIVVIAAAGNSGSSGNRNTMDYPARYSSVIAVGAVSSNNTRASFSSVGSELEVMAPGVNILSTTPGNNYASFNGTSMAAPHVAGAAALIKAKYPSMTNVQIRNRLKNTATNLGDPFFYGKGVINVESALQ

SEQ ID NO: 70415 - protein, 276 aa, Bacillus amyloliquefaciens
AQSVPYGVSQIKAPALHSQGYTGSNVKVAVIDSGIDSSHPDLKVAGGASMVPSETNPFQDNNSHGTHVAGTVAALDNSIGVLGVAPSASLYAVKVLGARGGSGQYSWIINGIEWAIANNMDVINMSLGGPSGSAALKAAVDKAVASGVVVVAAAGNEGTSGSSSTVGYPGKYPSVIAVGAVDSSNQRASFSSVGPELDVMAPGVSIQSTLPGNKYGALNGTSMASPHVAGAAALILSKHPNWTNTQVRSSLENTTTKLGDSFYYGKGLINVQAAAQ

SEQ ID NO: 70416 - protein, 275 aa, Bacillus amyloliquefaciens
AQSVPYGVSQIKAPALHSQGYTGSNVKVAVIDSGIDSSHPDLKVAGGASMVPSETNPFQDNNSHGTHVAGTVAALNNSIGVLGVAPSASLYAVKVLHSLGSGQYSWIINGIEWAIANNMDVINMSLGGPSGSAALKAAVDKAVASGVVVVAAAGNEGTSGSSSTVGYPGKYPSVIAVGAVDSSNQRASFSSVGPELDVMAPGVSIQSTLPGNKYGALNGTSMASPHVAGAAALILSKHPNWTNTQVRSSLENTTTKLGDSFYYGKGLINVQAAAQ

SEQ ID NO: 70417 - protein, 275 aa, Bacillus sp.
AQTVPWGIPHIKADKAHAAGVTGSGVKVAILDTGIDANHADLNVKGGASFVSGEPNALQDGNGHGTHVAGTVAALDNTTGVLGVAYNADLYAVKVLSASGSGTLSGIAQGIEWSISNRMNVINMSLGTKLGSTALQQACNNAYNRGIVVIAAAGNSGSSGNRNTMDYPARYSSVIAVGAVSSNNTRASFSSVGSELEVMAPGVNILSTTPGNNYASFNGTSMAAPHVAGAAALIKAKYPSMTNVQIRNRLKNTATNLGDPFFYGKGVINVESALQ

SEQ ID NO: 70418 - protein, 275 aa, Bacillus amyloliquefaciens
AQSVPYGVSQIKATALHSQGYTGSNVKVAVIDSGIDSSHPDLKVAGGASMVPGESXAFQDNNSHGTHVAGTVAALNNSIGVLGVAPSASLYAVKVLGADGSGQYSWIINGIEWAIANNMDVINMSLGGPSGSAALKAAVDKAVASGVVVVAAAGNEGTSGSSSTVGYPGKYPSVIAVGAVDSSNQRASFSSVGPELDVMAPGVSIQSTLPGNKYGALNGTSMASPHVAGAAALILSKHPNWTNTQVRSSLENTTTKLGDSFYYGKGLINVQAAAQ

SEQ ID NO: 70419 - protein, 275 aa, Bacillus sp.
AQTVPWGIPHIKADKAHAAGVTGSGVKVAILDTGIDANHADLNVKGGASFVSGEPNALQDGNGHGTHVAGTVAALDNTTGVLGVAYNADLYAVKVLSASGSGTLSGIAQGIEWSISNRMNVINMSLGDNYGSTALQQACNNAYNRGIVVIAAAGNSGSSGNRNTMDYPARYSSVIAVGAVSSNNTRASFSSVGSELEVMAPGVNILSTTPGNNYASFNGTSMAAPHVAGAAALIKAKYPSMTNVQIRNRLKNTATNLGDPFFYGKGVINVESALQ

SEQ ID NO: 70420 - protein, 275 aa, Synthetic construct
AQVVPWGIPHIKADKAHASGVTGSGVKVAVLDTGIDANHEDLNVKGGASFVSGEPNALQDGNGHGTHVAGTVAALNNTTGVLGVAYNAFLYAVKVLGASGSGTLSGIAQGIEWSIANDMDVINMSLGISTGSTALQQACNNAYASGIVVVAAAGNSGSNGKRNTMGYPARYSSVIAVGAVDSSNNRASFSSVGSELEVMAPGVSILSTTPGNNYESFNGTSMASPHVAGAAALIKAKYPSMTNVQIRNKLKNTATNLGDAFYYGHGVINVEKALQ

SEQ ID NO: 70421 - protein, 276 aa, Bacillus amyloliquefaciens
AQSVPYGVSQIKAPALHSQGYTGSNVKVAVIDSGIDSSHPDLKVAGGASMVPSETNPFQDNNSHGTHVAGTVAALNNSIGVLGVAPSASLYAVKVLGALSGSGQYSWIINGIEWAIANNMDVINMSLGGPSGSAALKAAVDKAVASGVVVVAAAGNEGTSGSSSTVGYPGKYPSVIAVGAVDSSNQRASFSSVGPELDVMAPGVSIQSTLPGNKYGALNGTSMASPHVAGAAALILSKHPNWTNTQVRSSLENTTTKLGDSFYYGKGLINVQAAAQ

SEQ ID NO: 70422 - protein, 275 aa, Synthetic construct
AQVVPWGIPHIKADKAHASGVTGSGVKVAVLDTGIDANHADLNVKGGASFVSGEPNALQDGNGHGTHVAGTVAALNNTTGVLGVAYNAFLYAVKVLGASGSGTLSGIAQGIEWSIANDMDVINMSLGSPTGSTALQQACNNAYASGIVVVAAAGNSGSNGKRNTMGYPARYSSVIAVGAVDSSNNRASFSSVGSELEVMAPGVSILSTTPGNNYESFNGTSMASPHVAGAAALIKAKYPSMTNVQIRNKLKNTATNLGDAFYYGHGVINVEKALQ

SEQ ID NO: 70423 - protein, 275 aa, Bacillus sp.
AQTVPWGIPHIKADKAHAAGVTGSGVKVAILDTGIDANHDDLNVKGGASFVTGEPNALQDGNGHGTHVAGTVAALDNTTGVLGVAYNADLYAVKVLSASGSGTLSGIAQGIEWSISNGMNVINMSLGMFYGSTALQQACNNAYNRGIVVIAAAGNSGSSGNRNTMHYPARYSSVIAVGAVSSNNTRASFSSVGSELEVMAPGVNILSTTPGNNYASFNGTSMAAPHVAGAAALIKAKYPSMTNVQIRERLKNTATNLGDPFFYGKGVINVESALQ

SEQ ID NO: 70424 - protein, 275 aa, Bacillus sp.
AQTVPWGIPHIKADKAHAAGVTGSGVKVAILDTGIDANHADLNVKGGASFVSGEPNALQDGNGHGTHVAGTVAALNNTTGVLGVAYNADLYAVKVLSASGSGTLSGIAQGIEWSISNGMNVINMSLGVMHGSTALQQACNNAYNRGIVVIAAAGNSGSSGNRNTMDYPARYSSVIAVGAVSSNNTRASFSSVGSELEVMAPGVNILSTTPGNNYASRNGTSMAAPHVAGAAALIKAKYPSMTNVQIRNRLKNTATNLGDPFFYGKGVINVEKALQ

SEQ ID NO: 70425 - protein, 275 aa, Bacillus sp.
AQTVPWGIPHIKADKAHAAGVTGSGVKVAILDTGIDANHADLNVKGGASFVSGEPNALQDGNGHGTHVAGTVAALDNTTGVLGVAYNADLYAVKVLSASGSGTLSGIAQGIEWSISNRMNVINMSLGNVVGSTALQQACNNAYNRGIVVIAAAGNSGSSGNRNTMDYPARYSSVIAVGAVSSNNTRASFSSVGSELEVMAPGVNILSTTPGNNYASFNGTSMAAPHVAGAAALIKAKYPSMTNVQIRNRLKNTATNLGDPFFYGKGVINVESALQ

SEQ ID NO: 70426 - protein, 275 aa, Bacillus sp.
AQTVPWGIPHIKADKAHAAGVTGSGVKVAILDTGIDANHADLNVKGGASFVSGEPNALQDGNGHGTHVAGTVAALDNTTGVLGVAYNADLYAVKVLSASGSGTLSGIAQGIEWSISNRMNVINMSLGYGTGSTALQQACNNAYNRGIVVIAAAGNSGSSGNRNTMDYPARYSSVIAVGAVSSNNTRASFSSVGSELEVMAPGVNILSTTPGNNYASFNGTSMAAPHVAGAAALIKAKYPSMTNVQIRNRLKNTATNLGDPFFYGKGVINVESALQ

SEQ ID NO: 70427 - protein, 275 aa, Bacillus sp.
AQTVPWGIPHIKADKAHAAGVTGSGVKVAILDTGIDANHADLNVKGGASFVSGEPNALQDGNGHGTHVAGTVAALDNTTGVLGVAYNADLYAVKVLSASGSGTLSGIAQGIEWSISNRMNVINMSLGESRGSTALQQACNNAYNRGIVVIAAAGNSGSSGNRNTMDYPARYSSVIAVGAVSSNNTRASFSSVGSELEVMAPGVNILSTTPGNNYASFNGTSMAAPHVAGAAALIKAKYPSMTNVQIRNRLKNTATNLGDPFFYGKGVINVESALQ

SEQ ID NO: 70428 - protein, 275 aa, Bacillus amyloliquefaciens
AQSVPYGVSQIKAPALHSQGYTGSNVKVAVIDSGIDSSHPDLKVAGGASMVPSETNPFQDNNSHGTHVAGTVAALNNSIGVLGVAPSASLYAVKVLSGSGSGQYSWIINGIEWAIANNMDVINMSLGGPSGSAALKAAVDKAVASGVVVVAAAGNEGTSGSSSTVGYPGKYPSVIAVGAVDSSNQRASFSSVGPELDVMAPGVSIQSTLPGNKYGALNGTSMASPHVAGAAALILSKHPNWTNTQVRSSLENTTTKLGDSFYYGKGLINVQAAAQ

SEQ ID NO: 70429 - protein, 275 aa, Bacillus amyloliquefaciens
AQSVPYGVSQIKATALHSQGYTGSNVKVAVIDSGIDSSHPDLKVAGGASMVPGETXAFQDNNSHGTHVAGTVAALNNSIGVLGVAPSASLYAVKVLGADGSGQYSWIINGIEWAIANNMDVINMSLGGPSGSAALKAAVDKAVASGVVVVAAAGNEGTSGSSSTVGYPGKYPSVIAVGAVDSSNQRASFSSVGPELDVMAPGVSIQSTLPGNKYGALNGTSMASPHVAGAAALILSKHPNWTNTQVRSSLENTTTKLGDSFYYGKGLINVQAAAQ

SEQ ID NO: 70430 - protein, 275 aa, Bacillus amyloliquefaciens
AQSVPYGVSQIKAPALHSQGYTGSNVKVAVIDSGIDSSHPDLKVAGGASMVPSETNPFQDNNSHGTHVAGTVAALNNSIGVLGVAPSASLYAVKVLGHGGSGQYSWIINGIEWAIANNMDVINMSLGGPSGSAALKAAVDKAVASGVVVVAAAGNEGTSGSSSTVGYPGKYPSVIAVGAVDSSNQRASFSSVGPELDVMAPGVSIQSTLPGNKYGTLNGTSMASPHVAGAAALILSKHPNWTNTQVRSSLENTTTKLGDSFYYGKGLINVQAAAQ

SEQ ID NO: 70431 - protein, 275 aa, Bacillus sp.
AQTVPWGIPHIKADKAHAAGVTGSGVKVAILDTGIDANHADLNVKGGASFVSGEPNALQDGNGHGTHVAGTVAALDNTTGVLGVAYNADLYAVKVLSASGSGTLSGIAQGIEWSISNRMNVINMSLGSVQGSTALQQACNNAYNRGIVVIAAAGNSGSSGNRNTMDYPARYSSVIAVGAVSSNNTRASFSSVGSELEVMAPGVNILSTTPGNNYASFNGTSMAAPHVAGAAALIKAKYPSMTNVQIRNRLKNTATNLGDPFFYGKGVINVESALQ

SEQ ID NO: 70432 - protein, 275 aa, Bacillus sp.
AQTVPWGIPHIKADKAHAAGVTGSGVKVAILDTGIDANHADLNVQGGASFVSEEPNALQDGNGHGTHVAGTVAALNNTTGVLGVAYNADLYAVKVLSASGSGTLSGIAQGIEWSISNGMNVINMSLGGSSGSTALQQACNNAYNRGIVVIAAAGNSGSDGNRNTMGYPARYSSVIAVGAVSSNNTRASFSSVGSELEVMAPGVNILSTTPGNNYASFNGTSMAAPHVAGAAALIKAKYPSMTNVQIRERLKNTATPLGDPFFYGKGVINVESALQ

SEQ ID NO: 70433 - protein, 274 aa, Bacillus amyloliquefaciens
AQSVPYGVSQIKAPALHSQGYTGSNVKVAVIDSGIDSSHPDLKVAGGASMVPGESAFQDNNSHGTHVAGTVAALNNSIGVLGVAPSASLYAVKVLGADGSGQYSWIINGIEWAIANNMDVINMSLGGPSGSAALKAAVDKAVASGVVVVAAAGNEGTSGSSSTVGYPGKYPSVIAVGAVDSSNQRASFSSVGPELDVMAPGVSIQSTLPGNKYGALNGTSMASPHVAGAAALILSKHPNWTNTQVRSSLENTTTKLGDSFYYGKGLINVQAAAQ

SEQ ID NO: 70434 - protein, 275 aa, Bacillus sp.
AQTVPWGIPHIKADKAHAAGVTGSGVKVAILDTGIDANHADLNVKGGASFVTGEPNALQDGNGHGTHVAGTVAALDNTTGVLGVAYNADLYAVKVLSASGSGTLSGIAQGIEWSISNRMNVINMSLGVMHGSTALQQACNNAYNRGIVVIAAAGNSGSSGNRNTMDYPARYSSVIAVGAVSSNNTRASFSSVGSELEVMAPGVNILSTTPGNNYASRNGTSMAAPHVAGAAALIKAKYPSMTNVQIRNRLKNTATELGDPFFYGKGVINVEKALQ

SEQ ID NO: 70435 - protein, 275 aa, Bacillus sp.
AQTVPWGIPHIKADKAHAAGVTGSGVKVAILDTGIDANHADLNVKGGASFVSGEPNALQDGNGHGTHVAGTVAALDNTTGVLGVAYNADLYAVKVLSASGSGTLSGIAQGIEWSISNRMNVINMSLGEHTGSTALQQACNNAYNRGIVVIAAAGNSGSSGNRNTMDYPARYSSVIAVGAVSSNNTRASFSSVGSELEVMAPGVNILSTTPGNNYASFNGTSMAAPHVAGAAALIKAKYPSMTNVQIRNRLKNTATNLGDPFFYGKGVINVESALQ

SEQ ID NO: 70436 - protein, 275 aa, Bacillus amyloliquefaciens
AQSVPYGVSQIKAPALHSQGYTGSNVKVAVIDSGIDSSHPDLKVAGGASMVPSETNPFQDNNSHGTHVAGTVAALNNSIGVLGVAPSASLYAVKVLRCSGSGQYSWIINGIEWAIANNMDVINMSLGGPSGSAALKAAVDKAVASGVVVVAAAGNEGTSGSSSTVGYPGKYPSVIAVGAVDSSNQRASFSSVGPELDVMAPGVSIQSTLPGNKYGALNGTSMASPHVAGAAALILSKHPNWTNTQVRSSLENTTTKLGDSFYYGKGLINVQAAAQ

SEQ ID NO: 70437 - protein, 275 aa, Bacillus sp.
AQTVPWGIPHIKADKAHAAGVTGSGVKVAILDTGIDANHADLNVKGGASFVSGEPNALQDGNGHGTHVAGTVAALDNTTGVLGVAYNADLYAVKVLSASGSGTLSGIAQGIEWSISNRMNVINMSLGMFFGSTALQQACNNAYNRGIVVIAAAGNSGSSGNRNTMGYPARYSSVIAVGAVSSNNTRASFSSVGSELEVMAPGVNILSTTPGNNYASFNGTSMAAPHVAGAAALIKAKFPSMTNVQIRERLKNTATNLGDPFFYGKGVINVESALQ

SEQ ID NO: 70438 - protein, 275 aa, Bacillus sp.
AQTVPWGIPHIKADKAHAAGVTGSGVKVAILDTGIDANHADLNVKGGASFVSGEPNALQDGNGHGTHVAGTVAALDNTTGVLGVAYNADLYAVKVLSASGSGTLSGIAQGIEWSISNRMNVINMSLGSLMGSTALQQACNNAYNRGIVVIAAAGNSGSSGNRNTMDYPARYSSVIAVGAVSSNNTRASFSSVGSELEVMAPGVNILSTTPGNNYASFNGTSMAAPHVAGAAALIKAKYPSMTNVQIRNRLKNTATNLGDPFFYGKGVINVESALQ

SEQ ID NO: 70439 - protein, 275 aa, Bacillus amyloliquefaciens
AQSVPYGVSQIKAPALHSQGYTGSNVKVAVIDSGIDSSHPDLKVAGGASMVPSETNPFQDNNSHGTHVAGTVAALNNSIGVLGVAPSASLYAVKVLGSRGSGQYSWIINGIEWAIANNMDVINMSLGGPSGSAALKAAVDKAVASGVVVVAAAGNEGTSGSSSTVGYPGKYPSVIAVGAVDSSNQRASFSSVGPELDVMAPGVSIQSTLPGNKYGALNGTSMASPHVAGAAALILSKHPNWTNTQVRSSLENTTTKLGDSFYYGKGLINVQAAAQ

SEQ ID NO: 70440 - protein, 275 aa, Bacillus amyloliquefaciens
AQSVPYGVSQIKAPALHSQGYTGSNVKVAVIDSGIDSSHPDLKVAGGASMVPSETNPFQDNNSHGTHVAGTVAALNNSIGVLGVAPSASLYAVKVLCNSGSGQYSWIINGIEWAIANNMDVINMSLGGPSGSAALKAAVDKAVASGVVVVAAAGNEGTSGSSSTVGYPGKYPSVIAVGAVDSSNQRASFSSVGPELDVMAPGVSIQSTLPGNKYGALNGTSMASPHVAGAAALILSKHPNWTNTQVRSSLENTTTKLGDSFYYGKGLINVQAAAQ

SEQ ID NO: 70441 - protein, 275 aa, Bacillus sp.
AQTVPWGIPHIKADKAHAAGVTGSGVKVAILDTGIDANHADLNVKGGASFVFGEPNALQDGNGHGTHVAGTVAALDNTTGVLGVAYNADLYAVKVLSASGSGTLSGIAQGIEWSISNRMNVINMSLGDFYGSTALQQACNNAYNRGIVVIAAAGNSGSSGNRNTMDYPARYSSVIAVGAVSSNNTRASFSSVGSELEVMAPGVNILSTTPGNNYASRNGTSMAAPHVAGAAALIKAKYPSMTNVQIRNRLKNTATNLGDPFFYGKGVINVEKALQ

SEQ ID NO: 70442 - protein, 275 aa, Bacillus sp.
AQTVPWGIPHIKADKAHAAGVTGSGVKVAILDTGIDANHADLNVKGGASFVSDEPNALQDGNGHGTHVAGTVAALDNTTGVLGVAYNADLYAVKVLSASGSGTLSGIAQGIEWSISNRMNVINMSLGGSSGSTALQQACNNAYNRGIVVIAAAGNSGSSGNRNTMDYPARYSSVIAVGAVSSNNTRASFSSVGSELEVMAPGVNILSTTPGNNYASFNGTSMAAPHVAGAAALIKAKYPSMTNVQIRERLKNTATRLGDPFFYGKGVINVESALQ

SEQ ID NO: 70443 - protein, 275 aa, Bacillus sp.
AQTVPWGIPHIKADKAHAAGVTGSGVKVAILDTGIDANHADLNVKGGASFVSGEPNALQDGNGHGTHVAGTVAALDNTTGVLGVAYNADLYAVKVLSASGSGTLSGIAQGIEWSISNRMNVINMSLGSLEGSTALQQACNNAYNRGIVVIAAAGNSGSSGNRNTMDYPARYSSVIAVGAVSSNNTRASFSSVGSELEVMAPGVNILSTTPGNNYASFNGTSMAAPHVAGAAALIKAKYPSMTNVQIRNRLKNTATNLGDPFFYGKGVINVESALQ

SEQ ID NO: 70444 - protein, 275 aa, Bacillus subtilis
AQSVPYGIEQIKAPALHSQGYTGSNVKVAVIDSGIDSSHPDLNVRGGASFVPSETNPYQDGSSHGTHVSGTIAALNNNIGVLGVAPSASLYAVKVLDSTGSGQYSWIINGIEWAISNNMDVINMSLGGPTGSTALKTVVDKAVSSGIVVAAAAGNEGSSGSTSTVGYPAKYPSTIAVGAVNSSNQRASFSSAGSELDVMAPGVSIQSTLPGGTYGAYNGTSMATPHVAGAAALILSKHPTWTNAQVRDRLESTATYLGNSFYYGKGLINVQAAAQ

SEQ ID NO: 70445 - protein, 275 aa, Bacillus subtilis
AQSVPYGISQIKAPALHSQGYTGSNVKVAVIDSGIDSSHPDLNVRGGASFVPSETNPYQDGSSHGTHVAGTIAALNNSIGVLGVAPSASLYAVKVLDSTGSGQYSWIINGIEWAISNNMDVINMSLGSPTGSTALKTVVDKAVSSGIVVAAAAGNEGSSGSTSTVGYPAKYPSTIAVGAVNSSNQRASFSSAGSELDVMAPGVSIQSTLPGGTYGAYNGTSMATPHVAGAAALILSKHPTWTNAQVRDRLESTATYLGPSFYYGKGLINVQAAAQ

SEQ ID NO: 70446 - protein, 275 aa, Bacillus subtilis
AQVVPYGISQIKAPALHSQGYTGSNVKVAVIDSGIDSSHEDLNVRGGASFVPSETNPYQDGSSHGTHVAGTIAALNNSIGVLGVAPSASLYAVKVLDSTGSGQYSWIINGIEWAISNNMDVINMSLGGPTGSTALKTVVDKAVSSGIVVAAAAGNEGSSGSTSTVGYPAKYPSTIAVGAVNSSNQRASFSSAGSELDVMAPGVSIQSTLPGGTYGAYNGTSMATPHVAGAAALILSKHPTWTNAQVRDRLESTATYLGNSFYYGKGLINVQAAAQ

SEQ ID NO: 70447 - protein, 275 aa, Bacillus subtilis
AQSVPYGIEQIKAPALHSQGYTGSNVKVAVIDSGIDSSHPDLNVRGGASFVPSETNPYQDGSSHGTHVAGTIAALNNSIGVLGVAPSASLYAVKVLDSTGSGQYSWIINGIEWAISNNMDVINMSLGGPTGSTALKTVVDKAVSSGIVVAAAAGNEGSSGSTSTVQYPAKYPSTIAVGAVNSSNQRASFSSAGSELDVMAPGVSIQSTLPGGTYGAYNGTSMATPHVAGAAALILSKHPTWTNAQVRDRLESTATYLGNSFYYGKGLINVQAAAQ

SEQ ID NO: 70448 - protein, 275 aa, Bacillus subtilis
AQSVPYGIEQIKAPALHSQGYTGSNVKVAVIDSGIDSSHPDLNVRGGASFVPSETNPYQDGSSHGTHVSGTIAALNNSIGVLGVAPSASLYAVKVLDSTGSGQYSWIINGIEWAISNNMDVINMSLGGPTGSTALKTVVDKAVSSGIVVAAAAGNEGSSGSTSTVGYPAKYPSTIAVGAVNSSNQRASFSSAGSELDVMAPGVSIQSTLPGGTYGAYNGTSMATPHVAGAAALILSKHPTWTNAQVRDRLESTATYLGPSFYYGKGLINVQAAAQ

SEQ ID NO: 70449 - protein, 275 aa, Bacillus subtilis
AQVVPYGISQIKAPALHSQGYTGSNVKVAVIDSGIDSSHPDLNVRGGASFVPSETNPYQDGSSHGTHVSGTIAALNNSIGVLGVAPSASLYAVKVLDSTGSGQYSWIINGIEWAISNNMDVINMSLGGPTGSTALKTVVDKAVSSGIVVAAAAGNEGSSGSTSTVGYPAKYPSTIAVGAVNSSNQRASFSSAGSELDVMAPGVSIQSTLPGGTYGAYNGTSMATPHVAGAAALILSKHPTWTNAQVRDRLESTATYLGNSFYYGKGLINVQAAAQ

SEQ ID NO: 70450 - protein, 274 aa, Bacillus amyloliquefaciens
QSVPYGVSQIKAPALHSQGYTGGNVKVAVLDTGIDSSHPDLKVAGGASMVPGEPNPFQDPNGHGTHVAGTVAALNNNIGVLGVAPSTSLYAVKVLGADGNGQYSWIIGGIEWAITNNMDVINMSLGSPSHSAALKAAVDKAVASGVVVVAAAGNEGTSGSSSTVGYPAKYPSVIAVGAVDSSNQRASFSSVGPELDVMAPGVSIQSTLPGNKYGAQNGTSMAAPHVAGAAALILSKHPNWTVTQVRSQLENTTTKLGDSFYYGKGLINVQAAAQ

SEQ ID NO: 70451 - protein, 275 aa, Bacillus subtilis
AQSVPYGISQIKAPALHSQGYTGSNVKVAVIDSGIDSSHEDLNVRGGASFVPSETNPYQDGSSHGTHVAGTIAALNNNIGVLGVAPSASLYAVKVLDSTGSGQYSWIINGIEWAISNNMDVINMSLGGPTGSTALKTVVDKAVSSGIVVAAAAGNEGSSGSTSTVGYPAKYPSTIAVGAVNSSNQRASFSSAGSELDVMAPGVSIQSTLPGGTYGAYNGTSMATPHVAGAAALILSKHPTWTNAQVRDRLESTATYLGPSFYYGKGLINVQAAAQ

SEQ ID NO: 70452 - protein, 275 aa, Bacillus subtilis
AQSVPYGISQIKAPALHSQGYTGSNVKVAVIDSGIDSSHPDLNVRGGASFVPSETNPYQDGSSHGTHVSGTIAALDNSIGVLGVAPSASLYAVKVLDSTGSGQYSWIINGIEWAISNNMDVINMSLGGPTGSTALKTVVDKAVSSGIVVAAAAGNEGSSGSTSTVGYPAKYPSTIAVGAVNSSNQRASFSSAGSELDVMAPGVSIQSTLPGGTYGAYSGTSMATPHVAGAAALILSKHPTWTNAQVRDRLESTATYLGNSFYYGKGLINVQAAAQ

SEQ ID NO: 70453 - protein, 275 aa, Bacillus subtilis
AQSVPYGISQIKAPALHSQGYTGSNVKVAVIDSGIDSSHPDLNVRGGASFVPSETNPYQDGSSHGTHVAGTIAALNNSIGVLGVAPSASLYAVKVLDSTGSGQYSWIINGIEWAISNNMDVINMSLGGPTGSTALKTVVDKAVSSGIVVAAAAGNEGSSGSTSTVGYPAKYPSTIAVGAVNSSNQRASFSSAGSELDVMAPGVSIQSTLPGGTYGAYNGTSMATPHVARAAALILSKHPTWTNAQVRDRLESTATYLGNSFYYGKGLINVQAAAQ

SEQ ID NO: 70454 - protein, 275 aa, Bacillus subtilis
AQSVPYGISQIKAPALHSQGYTGSNVKVAVIDSGIDSSHPDLNVRGGASFVPSETNPYQDGSSHGTHVSGTIAALNNSIGVLGVAPSASLYAVKVLDSTGSGQYSWIINGIEWAISNNMDVINMSLGGPTGSTALKTVVDKAVSSGIVVAAAAGNEGSSGSTSTVGYPAKYPSTIAVGAVNSSNQRASFSSAGSELDVMAPGVSIQSTLPGGTYGAYNGTSMATPHVAGAAALILSKHPTWTNAQVRDRLESTATYLGPSFYYGKGLINVQAAAQ

SEQ ID NO: 70455 - protein, 275 aa, Bacillus subtilis
AQSVPYGISQIKAPALHSQGYTGSNVKVAVIDSGIDSSHEDLNVRGGASFVPSETNPYQDGSSHGTHVSGTIAALDNNIGVLGVAPSASLYAVKVLDSTGSGQYSWIINGIEWAISNNMDVINMSLGGPTGSTALKTVVDKAVSSGIVVAAAAGNEGSSGSTSTVGYPAKYPSTIAVGAVNSSNQRASFSSAGSELDVMAPGVSIQSTLPGGTYGAYNGTSMATPHVAGAAALILSKHPTWTNAQVRDRLESTATYLGNSFYYGKGLINVQAAAQ

SEQ ID NO: 70456 - protein, 275 aa, Bacillus subtilis
AQVVPYGIEQIKAPALHSQGYTGSNVKVAVIDSGIDSSHPDLNVRGGASFVPSETNPYQDGSSHGTHVSGTIAALNNSIGVLGVAPSASLYAVKVLDSTGSGQYSWIINGIEWAISNNMDVINMSLGGPTGSTALKTVVDKAVSSGIVVAAAAGNEGSSGSTSTVGYPAKYPSTIAVGAVNSSNQRASFSSAGSELDVMAPGVSIQSTLPGGTYGAYNGTSMATPHVAGAAALILSKHPTWTNAQVRDRLESTATYLGNSFYYGKGLINVQAAAQ

SEQ ID NO: 70457 - protein, 275 aa, Bacillus subtilis
AQSVPYGISQIKAPALHSQGYTGSNVKVAVIDSGIDSSHEDLNVRGGASFVPSETNPYQDGSSHGTHVAGTIAALNNNIGVLGVAPSASLYAVKVLDSTGSGQYSWIINGIEWAISNNMDVINMSLGGPTGSTALKTVVDKAVSSGIVVAAAAGNEGSSGSTSTVGYPAKYPSTIAVGAVNSSNQRASFSSAGSELDVMAPGVSIQSTLPGGTYGAYNGTSMATPHVAGAAALILSKHPTWTNAQVRDRLESTATYLGNSFYYGKGLINVQAAAQ

SEQ ID NO: 70458 - protein, 275 aa, Bacillus subtilis
AQSVPYGIEQIKAPALHSQGYTGSNVKVAVIDSGIDSSHEDLNVRGGASFVPSETNPYQDGSSHGTHVAGTIAALNNNIGVLGVAPSASLYAVKVLDSTGSGQYSWIINGIEWAISNNMDVINMSLGGPTGSTALKTVVDKAVSSGIVVAAAAGNEGSSGSTSTVGYPAKYPSTIAVGAVNSSNQRASFSSAGSELDVMAPGVSIQSTLPGGTYGAYNGTSMATPHVAGAAALILSKHPTWTNAQVRDRLESTATYLGPSFYYGKGLINVQAAAQ

SEQ ID NO: 70459 - protein, 275 aa, Bacillus subtilis
AQSVPYGISQIKAPALHSQGYTGSNVKVAVIDSGIDSSHPDLNVRGGASFVPSETNPYQDGSSHGTHVAGTIAALNNNIGVLGVAPSASLYAVKVLDSTGSGQYSWIINGIEWAISNNMDVINMSLGGPTGSTALKTVVDKAVSSGIVVAAAAGNEGSSGSTSTVGYPAKYPSTIAVGAVNSSNQRASFSSAGSELDVMAPGVSIQSTLPGGTYGAYSGTSMATPHVAGAAALILSKHPTWTNAQVRDRLESTATYLGNSFYYGKGLINVQAAAQ

SEQ ID NO: 70460 - protein, 275 aa, Bacillus subtilis
AQVVPYGIEQIKAPALHSQGYTGSNVKVAVIDSGIDSSHPDLNVRGGASFVPSETNPYQDGSSHGTHVAGTIAALNNSIGVLGVAPSASLYAVKVLDSTGSGQYSWIINGIEWAISNNMDVINMSLGGPTGSTALKTVVDKAVSSGIVVAAAAGNEGSSGSTSTVGYPAKYPSTIAVGAVNSSNQRASFSSAGSELDVMAPGVSIQSTLPGGTYGAYSGTSMATPHVAGAAALILSKHPTWTNAQVRDRLESTATYLGNSFYYGKGLINVQAAAQ

SEQ ID NO: 70461 - protein, 275 aa, Bacillus subtilis
AQVVPYGISQIKAPALHSQGYTGSNVKVAVIDSGIDSSHPDLNVRGGASFVPSETNPYQDGSSHGTHVSGTIAALNNNIGVLGVAPSASLYAVKVLDSTGSGQYSWIINGIEWAISNNMDVINMSLGGPTGSTALKTVVDKAVSSGIVVAAAAGNEGSSGSTSTVGYPAKYPSTIAVGAVNSSNQRASFSSAGSELDVMAPGVSIQSTLPGGTYGAYNGTSMATPHVAGAAALILSKHPTWTNAQVRDRLESTATYLGNSFYYGKGLINVQAAAQ

SEQ ID NO: 70462 - protein, 275 aa, Bacillus subtilis
AQVVPYGISQIKAPALHSQGYTGSNVKVAVIDSGIDSSHPDLNVRGGASFVPSETNPYQDGSSHGTHVSGTIAALNNSIGVLGVAPSASLYAVKVLDSTGSGQYSWIINGIEWAISNNMDVINMSLGGPTGSTALKTVVDKAVSSGIVVAAAAGNEGSSGSTSTVGYPAKYPSTIAVGAVNSSNQRASFSSAGSELDVMAPGVSIQSTLPGGTYGAYNGTSMATPHVAGAAALILSKHPTWTNAQVRDRLESTATYLGPSFYYGKGLINVQAAAQ

SEQ ID NO: 70463 - protein, 275 aa, Bacillus subtilis
AQVVPYGISQIKAPALHSQGYTGSNVKVAVIDSGIDSSHPDLNVRGGASFVPSETNPYQDGSSHGTHVAGTIAALNNSIGVLGVAPSASLYAVKVLDSTGSGQYSWIINGIEWAISNNMDVINMSLGGPTGSTALKTVVDKAVSSGIVVAAAAGNEGSSGSTSTVGYPAKYPSTIAVGAVNSSNQRASFSSAGSELDVMAPGVSIQSTLPGGTYGAYSGTSMATPHVAGAAALILSKHPTWTNAQVRDRLESTATYLGPSFYYGKGLINVQAAAQ

SEQ ID NO: 70464 - protein, 275 aa, Bacillus subtilis
AQSVPYGISQIKAPALHSQGYTGSNVKVAVIDSGIDSSHEDLNVRGGASFVPSETNPYQDGSSHGTHVAGTIAALDNSIGVLGVAPSASLYAVKVLDSTGSGQYSWIINGIEWAISNNMDVINMSLGGPTGSTALKTVVDKAVSSGIVVAAAAGNEGSSGSTSTVGYPAKYPSTIAVGAVNSSNQRASFSSAGSELDVMAPGVSIQSTLPGGTYGAYSGTSMATPHVAGAAALILSKHPTWTNAQVRDRLESTATYLGNSFYYGKGLINVQAAAQ

SEQ ID NO: 70465 - protein, 275 aa, Bacillus subtilis
AQSVPYGISQIKAPALHSQGYTGSNVKVAVIDSGIDSSHEDLNVRGGASFVPSETNPYQDGSSHGTHVAGTIAALDNSIGVLGVAPSASLYAVKVLDSTGSGQYSWIINGIEWAISNNMDVINMSLGGPTGSTALKTVVDKAVSSGIVVAAAAGNEGSSGSTSTVQYPAKYPSTIAVGAVNSSNQRASFSSAGSELDVMAPGVSIQSTLPGGTYGAYNGTSMATPHVAGAAALILSKHPTWTNAQVRDRLESTATYLGPSFYYGKGLINVQAAAQ

SEQ ID NO: 70466 - protein, 275 aa, Bacillus subtilis
AQSVPYGISQIKAPALHSQGYTGSNVKVAVIDSGIDSSHPDLNVRGGASFVPSETNPYQDGSSHGTHVAGTIAALDNSIGVLGVAPSASLYAVKVLDSTGSGQYSWIINGIEWAISNNMDVINISLGSPTGSTALKTVVDKAVSSGIVVAAAAGNEGSSGSTSTVGYPAKYPSTIAVGAVNSSNQRASFSSAGSELDVMAPGVSIQSTLPGGTYGAYNGTSMATPHVAGAAALILSKHPTWTNAQVRDRLESTATYLGPSFYYGKGLINVQAAAQ

SEQ ID NO: 70467 - protein, 275 aa, Bacillus subtilis
AQVVPYGISQIKAPALHSQGYTGSNVKVAVIDSGIDSSHEDLNVRGGASFVPSETNPYQDGSSHGTHVAGTIAALNNSIGVLGVAPSASLYAVKVLDSTGSGQYSWIINGIEWAISNNMDVINMSLGGPTGSTALKTVVDKAVSSGIVVAAAAGNEGSSGSTSTVGYPAKYPSTIAVGAVNSSNQRASFSSAGSELDVMAPGVSIQSTLPGGTYGAYNGTSMATPHVAGAAALILSKHPTWTNAQVRDRLESTATYLGPSFYYGKGLINVQAAAQ

SEQ ID NO: 70468 - protein, 275 aa, Bacillus subtilis
AQSVPYGISQIKAPALHSQGYTGSNVKVAVIDSGIDSSHPDLNVRGGASFVPSETNPYQDGSSHGTHVAGTIAALNNSIGVLGVSPSASLYAVKVLDSTGSGQYSWIINGIEWAISNNMDVINMSLGGPSGSTALKTVVDKAVSSGIVVAAAAGNEGSSGSSSTVGYPAKYPSTIAVGAVNSSNQRASFSSAGSELDVMAPGVSIQSTLPGGTYGAYNGTSMATPHVAGAAALILSKHPTWTNAQVRDRLESTATYLGNSFYYGKGLINVQAAAQ

SEQ ID NO: 70469 - protein, 275 aa, Bacillus subtilis
AQVVPYGISQIKAPALHSQGYTGSNVKVAVIDSGIDSSHPDLNVRGGASFVPSETNPYQDGSSHGTHVAGTIAALDNSIGVLGVAPSASLYAVKVLDSTGSGQYSWIINGIEWAISNNMDVINISLGGPTGSTALKTVVDKAVSSGIVVAAAAGNEGSSGSTSTVQYPAKYPSTIAVGAVNSSNQRASFSSAGSELDVMAPGVSIQSTLPGGTYGAYNGTSMATPHVAGAAALILSKHPTWTNAQVRDRLESTATYLGNSFYYGKGLINVQAAAQ

SEQ ID NO: 70470 - protein, 275 aa, Bacillus subtilis
AQSVPYGIEQIKAPALHSQGYTGSNVKVAVIDSGIDSSHEDLNVRGGASFVPSETNPYQDGSSHGTHVAGTIAALNNSIGVLGVAPSASLYAVKVLDSTGSGQYSWIINGIEWAISNNMDVINMSLGGPTGSTALKTVVDKAVSSGIVVAAAAGNEGSSGSTSTVGYPAKYPSTIAVGAVNSSNQRASFSSAGSELDVMAPGVSIQSTLPGGTYGAYNGTSMATPHVAGAAALILSKHPTWTNAQVRDRLESTATYLGPSFYYGKGLINVQAAAQ

SEQ ID NO: 70471 - protein, 275 aa, Bacillus subtilis
AQSVPYGISQIKAPALHSQGYTGSNVKVAVIDSGIDSSHPDLNVRGGASFVPSETNPYQDGSSHGTHVAGTIAALNNSIGVLGVSPSASLYAVKVLDSTGSGQYSWIINGIEWAIENNMDVINMSLGGPTGSTALKTVVDKAVSSGIVVAAAAGNEGSSGSTSTVGYPAKYPSTIAVGAVNSSNQRASFSSAGSELDVMAPGVSIQSTLPGGTYGAYNGTSMATPHVAGAAALILSKHPTWTNAQVRDRLESTATYLGNSFYYGKGLINVQAAAQ

SEQ ID NO: 70472 - protein, 275 aa, Bacillus subtilis
AQSVPYGIEQIKAPALHSQGYTGSNVKVAVIDSGIDSSHPDLNVRGGASFVPSETNPYQDGSSHGTHVAGTIAALNNNIGVLGVAPSASLYAVKVLDSTGSGQYSWIINGIEWAISNNMDVINMSLGGPTGSTALKTVVDKAVSSGIVVAAAAGNEGSSGSTSTVGYPAKYPSTIAVGAVNSSNQRASFSSAGSELDVMAPGVSIQSTLPGGTYGAYSGTSMATPHVAGAAALILSKHPTWTNAQVRDRLESTATYLGPSFYYGKGLINVQAAAQ

SEQ ID NO: 70473 - protein, 275 aa, Bacillus subtilis
AQSVPYGISQIKAPALHSQGYTGSNVKVAVIDSGIDSSHEDLNVRGGASFVPSETNPYQDGSSHGTHVAGTIAALNNSIGVLGVAPSASLYAVKVLDSTGSGQYSWIINGIEWAISNNMDVINMSLGGPTGSTALKTVVDKAVSSGIVVAAAAGNEGSSGSTSTVGYPAKYPSTIAVGAVNSSNQRASFSSAGSELDVMAPGVSIQSTLPGGTYGAYNGTSMATPHVAGAAALILSKHPTWTNAQVRDRLESTATYLGPSFYYGKGLINVQAAAQ

SEQ ID NO: 70474 - protein, 275 aa, Bacillus subtilis
AQSVPYGISQIKAPALHSQGYTGSNVKVAVIDSGIDSSHPDLNVRGGASFVPSETNPYQDGSSHGTHVAGTIAALNNSIGVLGVSPSASLYAVKVLDSTGSGQYSWIINGIEWAISNNMDVINMSLGGPTGSTALKTVVDKAVSSGIVVAAAAGNEGSSGSTSTVGYPAKYPSTIAVGAVNSSNQRASFSSAGSELDVMAPGVSIQSTLPGGTYGAYNGTSMATPHVAGAAALILSKHPTWTNAQVRDRLESTATYLGNSFYYGKGLINVQAAAQ

SEQ ID NO: 70475 - protein, 275 aa, Bacillus subtilis
AQSVPYGISQIKAPALHSQGYTGSNVKVAVIDSGIDSSHPDLNVRGGASFVPSETNPYQDGSSHGTHVAGTIAALNNSIGVLGVAPSASLYAVKVLDSTGSGQYSWIINGIEWAISNNMDVINMSLGGPTGSTALKTVVDKAVSSGIVVAAAAGNEGSSGSSSTVGYPAKYPSTIAVGAVNSSNQRASFSSAGSELDVMAPGVSIQSTLPGGTYGAYNGTSMATPHVAGAAALILSKHPTWTNAQVRDRLESTATYLGNSFYYGKGLINVQAAAQ

SEQ ID NO: 70476 - protein, 275 aa, Bacillus subtilis
AQSVPYGIEQIKAPALHSQGYTGSNVKVAVIDSGIDSSHPDLNVRGGASFVPSETNPYQDGSSHGTHVAGTIAALNNNIGVLGVAPSASLYAVKVLDSTGSGQYSWIINGIEWAISNNMDVINMSLGGPTGSTALKTVVDKAVSSGIVVAAAAGNEGSSGSTSTVGYPAKYPSTIAVGAVNSSNQRASFSSAGSELDVMAPGVSIQSTLPGGTYGAYSGTSMATPHVAGAAALILSKHPTWTNAQVRDRLESTATYLGNSFYYGKGLINVQAAAQ

SEQ ID NO: 70477 - protein, 275 aa, Bacillus subtilis
AQSVPYGISQIKAPALHSQGYTGSNVKVAVIDSGIDSSHEDLNVRGGASFVPSETNPYQDGSSHGTHVAGTIAALDNSIGVLGVAPSASLYAVKVLDSTGSGQYSWIINGIEWAISNNMDVINMSLGGPTGSTALKTVVDKAVSSGIVVAAAAGNEGSSGSTSTVQYPAKYPSTIAVGAVNSSNQRASFSSAGSELDVMAPGVSIQSTLPGGTYGAYNGTSMATPHVAGAAALILSKHPTWTNAQVRDRLESTATYLGNSFYYGKGLINVQAAAQ

SEQ ID NO: 70478 - protein, 275 aa, Bacillus subtilis
AQSVPYGISQIKAPALHSQGYTGSNVKVAVIDSGIDSSHPDLNVRGGASFVPSETNPYQDGSSHGTHVSGTIAALNNNIGVLGVAPSASLYAVKVLDSTGSGQYSWIINGIEWAISNNMDVINMSLGGPTGSTALKTVVDKAVSSGIVVAAAAGNEGSSGSTSTVGYPAKYPSTIAVGAVNSSNQRASFSSAGSELDVMAPGVSIQSTLPGGTYGAYNGTSMATPHVAGAAALILSKHPTWTNAQVRDRLESTATYLGPSFYYGKGLINVQAAAQ

SEQ ID NO: 70479 - protein, 275 aa, Bacillus subtilis
AQSVPYGISQIKAPALHSQGYTGSNVKVAVIDSGIDSSHPDLNVRGGASFVPTETNPYQDGSSHGTHVAGTIAALNNSIGVLGVSPSASLYAVKVLDSTGSGQYSWIINGIEWAIENNMDVINMSLGGPTGSTALKTVVDKAVSSGIVVAAAAGNEGSSGSTSTVGYPAKYPSTIAVGAVNSSNQRASFSSAGSELDVMAPGVSIQSTLPGGTYGAYNGTSMATPHVAGAAALILSKHPTWTNAQVRDRLESTATYLGNSFYYGKGLINVQAAAQ

SEQ ID NO: 70480 - protein, 275 aa, Bacillus subtilis
AQVVPYGIEQIKAPALHSQGYTGSNVKVAVIDSGIDSSHEDLNVRGGASFVPSETNPYQDGSSHGTHVAGTIAALNNSIGVLGVAPSASLYAVKVLDSTGSGQYSWIINGIEWAISNNMDVINMSLGGPTGSTALKTVVDKAVSSGIVVAAAAGNEGSSGSTSTVGYPAKYPSTIAVGAVNSSNQRASFSSAGSELDVMAPGVSIQSTLPGGTYGAYNGTSMATPHVAGAAALILSKHPTWTNAQVRDRLESTATYLGNSFYYGKGLINVQAAAQ

SEQ ID NO: 70481 - protein, 275 aa, Bacillus subtilis
AQSVPYGIEQIKAPALHSQGYTGSNVKVAVIDSGIDSSHPDLNVRGGASFVPSETNPYQDGSSHGTHVAGTIAALNNSIGVLGVAPSASLYAVKVLDSTGSGQYSWIINGIEWAISNNMDVINMSLGGPTGSTALKTVVDKAVSSGIVVAAAAGNEGSSGSTSTVQYPAKYPSTIAVGAVNSSNQRASFSSAGSELDVMAPGVSIQSTLPGGTYGAYNGTSMATPHVAGAAALILSKHPTWTNAQVRDRLESTATYLGPSFYYGKGLINVQAAAQ

SEQ ID NO: 70482 - protein, 275 aa, Bacillus subtilis
AQVVPYGISQIKAPALHSQGYTGSNVKVAVIDSGIDSSHPDLNVRGGASFVPSETNPYQDGSSHGTHVAGTIAALNNSIGVLGVAPSASLYAVKVLDSTGSGQYSWIINGIEWAISNNMDVINISLGGPTGSTALKTVVDKAVSSGIVVAAAAGNEGSSGSTSTVGYPAKYPSTIAVGAVNSSNQRASFSSAGSELDVMAPGVSIQSTLPGGTYGAYNGTSMATPHVAGAAALILSKHPTWTNAQVRDRLESTATYLGPSFYYGKGLINVQAAAQ

SEQ ID NO: 70483 - protein, 275 aa, Bacillus subtilis
AQSVPYGIEQIKAPALHSQGYTGSNVKVAVIDSGIDSSHPDLNVRGGASFVPSETNPYQDGSSHGTHVSGTIAALNNSIGVLGVAPSASLYAVKVLDSTGSGQYSWIINGIEWAISNNMDVINMSLGGPTGSTALKTVVDKAVSSGIVVAAAAGNEGSSGSTSTVGYPAKYPSTIAVGAVNSSNQRASFSSAGSELDVMAPGVSIQSTLPGGTYGAYNGTSMATPHVAGAAALILSKHPTWTNAQVRDRLESTATYLGNSFYYGKGLINVQAAAQ

SEQ ID NO: 70484 - protein, 275 aa, Bacillus amyloliquefaciens
AQSVPYGVSQIKAPALHSQGYTGSNVKVAVIDSGIDSSHPDLKVAGGASMVPSETNVFQDNNSHGTHVAGTVAALNNSIGVLGVAPSASLYAVKVLGADGSGQYSWIINGIEWAIANNMDVINMSLGGPSGSAALKAAVDKAVASGVVVVAAAGNEGTSGSSSTVGYPGKYPSVIAVGAVDSSNQRASFSSVGPELDVMAPGVSIQSTLPGNKYGAYNGTSMASPHVAGAAALILSKHPNWTNTQVRSSLENTTTKLGDSFYYGKGLINVQAAAQ

SEQ ID NO: 70485 - protein, 275 aa, Bacillus subtilis
AQSVPYGISQIKAPALHSQGYTGSNVKVAVIDSGIDSSHPDLNVRGGASFVPSETNPYQNGSSHGTHVAGTIAALNNSIGVLGVAPSASLYAVKVLGSTGSGRYSWIINGIEWAISNNMDVINMSLGGPTGSTALKTVVDKAVSSGIVVVAAAGNEGSSGSTSTVGYPAKYPSTIAVGAVNSSNQRASFSSAGSELDVMAPGVSIQSTLPGGTYGAYSGTSMATPHVAGAAALILSKHPTWTNAQVRDRLESTATYLGNSFYYGKGLINVQAAAQ

SEQ ID NO: 70486 - protein, 275 aa, Bacillus subtilis
AQSVPYGIEQIKAPALHSQGYTGSNVKVAVIDSGIDSSHPDLNVRGGASFVPSETNPYQDGSSHGTHVAGTIAALNNSIGVLGVAPSASLYAVKVLDSTGSGQYSWIINGIEWAISNNMDVINMSLGGPTGSTALKTVVDKAVSSGIVVAAAAGNEGSSGSTSTVGYPAKYPSTIAVGAVNSSNQRASFSSAGSELDVMAPGVSIQSTLPGGTYGAYSGTSMATPHVAGAAALILSKHPTWTNAQVRDRLESTATYLGPSFYYGKGLINVQAAAQ

SEQ ID NO: 70487 - protein, 275 aa, Bacillus subtilis
AQVVPYGISQIKAPALHSQGYTGSNVKVAVIDSGIDSSHPDLNVRGGASFVPSETNPYQDGSSHGTHVAGTIAALNNSIGVLGVAPSASLYAVKVLDSTGSGQYSWIINGIEWAISNNMDVINMSLGGPTGSTALKTVVDKAVSSGIVVAAAAGNEGSSGSTSTVGYPAKYPSTIAVGAVNSSNQRASFSSAGSELDVMAPGVSIQSTLPGGTYGAYSGTSMATPHVAGAAALILSKHPTWTNAQVRDRLESTATYLGNSFYYGKGLINVQAAAQ

SEQ ID NO: 70488 - protein, 275 aa, Bacillus subtilis
AQSVPYGISQIKAPALHSQGYTGSNVKVAVIDSGIDSSHPDLNVRGGASFVPSETNPYQDGSSHGTHVSGTIAALNNNIGVLGVAPSASLYAVKVLDSTGSGQYSWIINGIEWAISNNMDVINMSLGGPTGSTALKTVVDKAVSSGIVVAAAAGNEGSSGSTSTVGYPAKYPSTIAVGAVNSSNQRASFSSAGSELDVMAPGVSIQSTLPGGTYGAYNGTSMATPHVAGAAALILSKHPTWTNAQVRDRLESTATYLGNSFYYGKGLINVQAAAQ

SEQ ID NO: 70489 - protein, 275 aa, Bacillus subtilis
AQSVPYGISQIKAPALHSQGYTGSNVKVAVIDSGIDSSHPDLNVRGGASFVPSETNPYQDGSSHGTHVAGTIAALNNSIGVLGVAPSASLYAVKVLDSTGSGQYSWIINGIEWAISNNMDVINMSLGGPTGSTALKTVVDKAVSSGIVVAAAAGNEGSSGSTSTVQYPAKYPSTIAVGAVNSSNQRASFSSAGSELDVMAPGVSIQSTLPGGTYGAYNGTSMATPHVAGAAALILSKHPTWTNAQVRDRLESTATYLGNSFYYGKGLINVQAAAQ

SEQ ID NO: 70490 - protein, 275 aa, Bacillus subtilis
AQSVPYGIEQIKAPALHSQGYTGSNVKVAVIDSGIDSSHEDLNVRGGASFVPSETNPYQDGSSHGTHVAGTIAALNNNIGVLGVAPSASLYAVKVLDSTGSGQYSWIINGIEWAISNNMDVINMSLGGPTGSTALKTVVDKAVSSGIVVAAAAGNEGSSGSTSTVGYPAKYPSTIAVGAVNSSNQRASFSSAGSELDVMAPGVSIQSTLPGGTYGAYNGTSMATPHVAGAAALILSKHPTWTNAQVRDRLESTATYLGNSFYYGKGLINVQAAAQ

SEQ ID NO: 70491 - protein, 275 aa, Bacillus subtilis
AQSVPYGISQIKAPALHSQGYTGSNVKVAVIDSGIDSSHPDLNVRGGASFVPSETNPYQDGSSHGTHVAGTIAALDNNIGVLGVAPSASLYAVKVLDSTGSGQYSWIINGIEWAISNNMDVINISLGGPTGSTALKTVVDKAVSSGIVVAAAAGNEGSSGSTSTVGYPAKYPSTIAVGAVNSSNQRASFSSAGSELDVMAPGVSIQSTLPGGTYGAYSGTSMATPHVAGAAALILSKHPTWTNAQVRDRLESTATYLGNSFYYGKGLINVQAAAQ

SEQ ID NO: 70492 - protein, 275 aa, Bacillus subtilis
AQVVPYGIEQIKAPALHSQGYTGSNVKVAVIDSGIDSSHPDLNVRGGASFVPSETNPYQDGSSHGTHVAGTIAALNNSIGVLGVAPSASLYAVKVLDSTGSGQYSWIINGIEWAISNNMDVINMSLGGPTGSTALKTVVDKAVSSGIVVAAAAGNEGSSGSTSTVQYPAKYPSTIAVGAVNSSNQRASFSSAGSELDVMAPGVSIQSTLPGGTYGAYNGTSMATPHVAGAAALILSKHPTWTNAQVRDRLESTATYLGNSFYYGKGLINVQAAAQ

SEQ ID NO: 70493 - protein, 275 aa, Bacillus subtilis
AQSVPYGIEQIKAPALHSQGYTGSNVKVAVIDSGIDSSHPDLNVRGGASFVPSETNPYQDGSSHGTHVAGTIAALNNNIGVLGVAPSASLYAVKVLDSTGSGQYSWIINGIEWAISNNMDVINMSLGGPTGSTALKTVVDKAVSSGIVVAAAAGNEGSSGSTSTVQYPAKYPSTIAVGAVNSSNQRASFSSAGSELDVMAPGVSIQSTLPGGTYGAYNGTSMATPHVAGAAALILSKHPTWTNAQVRDRLESTATYLGNSFYYGKGLINVQAAAQ

SEQ ID NO: 70494 - protein, 275 aa, Bacillus subtilis
AQSVPYGISQIKAPALHSQGYTGSNVKVAVIDSGIDSSHPDLNVRGGASFVPSETNPYQDGSSHGTHVAGTIAALDNSIGVLGVAPSASLYAVKVLDSTGSGQYSWIINGIEWAISNNMDVINMSLGGPTGSTALKTVVDKAVSSGIVVAAAAGNEGSSGSTSTVQYPAKYPSTIAVGAVNSSNQRASFSSAGSELDVMAPGVSIQSTLPGGTYGAYSGTSMATPHVAGAAALILSKHPTWTNAQVRDRLESTATYLGPSFYYGKGLINVQAAAQ

SEQ ID NO: 70495 - protein, 275 aa, Bacillus sp. ZLW-2
AQSVPYGISQIKAPALHSQGYTGSNVKVAVIDSGIDSSHPDLNVRGGASFVPSETNPYQDGSSHGTHVAGTIAALNNSIGVLGVAPSASLYAVKVLDSTGSGQYSWIINGIEWAISNNMDIINMSLGGPTGSTALKTVVDKAVSSGIVVAAAAGNEGSSGSTSTVGYPAKYPSTIAVGAVNSSNQRASFSSAGSELDVMAPGVSIQSTLPGGTYGAYNGTSMATPHVAGATALILSKHPTWTNAQVRDRLESTATYLGSSFYYGKGLINVQAAAQ

SEQ ID NO: 70496 - protein, 275 aa, Bacillus subtilis
AQSVPYGISQIKAPALHSQGYTGSNVKVAVIDSGIDSSHPDLNVRGGASFVPSETNPYQDGSSHGTHVAGTIAALNNSIGVLGVAPSASLYAVKVLDSTGSGQYSWIINGIEWAISNNMDVINMSLGGPTGSTALKTVVDKAVSSGIVVAAAAGNEGSSGSTSTVGYPAKYPSTIAVGAVNSSNQRASFSSAGSELDVMAPGVSIQSTLPGGTYGAYSGTSMATPHVAGAAALILSKHPTWTNAQVRDRLESTATYLGPSFYYGKGLINVQAAAQ

SEQ ID NO: 70497 - protein, 275 aa, Bacillus subtilis
AQSVPYGISQIKAPALHSQGYTGSNVKVAVIDSGIDSSHPDLNVRGGASFVPSETNPYQDGSSHGTHVAGTIAALNNSIGVLGVAPSASLYAVKVLDSTGSGQYSWIINGIEWAISNNMDVINISLGGPTGSTALKTVVDKAVSSGIVVAAAAGNEGSSGSTSTVGYPAKYPSTIAVGAVNSSNQRASFSSAGSELDVMAPGVSIQSTLPGGTYGAYNGTSMATPHVAGAAALILSKHPTWTNAQVRDRLESTATYLGPSFYYGKGLINVQAAAQ

SEQ ID NO: 70498 - protein, 275 aa, Bacillus subtilis
AQSVPYGIEQIKAPALHSQGYTGSNVKVAVIDSGIDSSHEDLNVRGGASFVPSETNPYQDGSSHGTHVAGTIAALNNSIGVLGVAPSASLYAVKVLDSTGSGQYSWIINGIEWAISNNMDVINMSLGGPTGSTALKTVVDKAVSSGIVVAAAAGNEGSSGSTSTVGYPAKYPSTIAVGAVNSSNQRASFSSAGSELDVMAPGVSIQSTLPGGTYGAYNGTSMATPHVAGAAALILSKHPTWTNAQVRDRLESTATYLGNSFYYGKGLINVQAAAQ

SEQ ID NO: 70499 - protein, 275 aa, Bacillus subtilis
AQSVPYGISQIKAPALHSQGYTGSNVKVAVIDSGIDSSHPDLNVRGGASFVPSETNPYQDGSSHGTHVAGTIAALNNNIGVLGVAPSASLYAVKVLDSTGSGQYSWIINGIEWAISNNMDVINMSLGSPTGSTALKTVVDKAVSSGIVVAAAAGNEGSSGSTSTVGYPAKYPSTIAVGAVNSSNQRASFSSAGSELDVMAPGVSIQSTLPGGTYGAYNGTSMATPHVAGAAALILSKHPTWTNAQVRDRLESTATYLGNSFYYGKGLINVQAAAQ

SEQ ID NO: 70500 - protein, 275 aa, Bacillus subtilis
AQSVPYGISQIKAPALHSQGYTGSNVKVAVIDSGIDSSHPDLNVRGGASFVPSETNPYQDGSSHGTHVAGTIAALNNSIGVLGVAPSASLYAVKVLDSTGSGQYSWIINGIEWAISNNMDVINMSLGGPTGSTALKTVVDKAVSSGIVVAAAAGNEGSSGSTSTVQYPAKYPSTIAVGAVNSSNQRASFSSAGSELDVMAPGVSIQSTLPGGTYGAYNGTSMATPHVAGAAALILSKHPTWTNAQVRDRLESTATYLGPSFYYGKGLINVQAAAQ

SEQ ID NO: 70501 - protein, 275 aa, Bacillus subtilis
AQVVPYGISQIKAPALHSQGYTGSNVKVAVIDSGIDSSHPDLNVRGGASFVPSETNPYQDGSSHGTHVAGTIAALNNSIGVLGVAPSASLYAVKVLDSTGSGQYSWIINGIEWAISNNMDVINMSLGGPTGSTALKTVVDKAVSSGIVVAAAAGNEGSSGSTSTVQYPAKYPSTIAVGAVNSSNQRASFSSAGSELDVMAPGVSIQSTLPGGTYGAYNGTSMATPHVAGAAALILSKHPTWTNAQVRDRLESTATYLGNSFYYGKGLINVQAAAQ

SEQ ID NO: 70502 - protein, 275 aa, Bacillus subtilis
AQVVPYGISQIKAPALHSQGYTGSNVKVAVIDSGIDSSHPDLNVRGGASFVPSETNPYQDGSSHGTHVAGTIAALNNSIGVLGVAPSASLYAVKVLDSTGSGQYSWIINGIEWAISNNMDVINISLGGPTGSTALKTVVDKAVSSGIVVAAAAGNEGSSGSTSTVGYPAKYPSTIAVGAVNSSNQRASFSSAGSELDVMAPGVSIQSTLPGGTYGAYNGTSMATPHVAGAAALILSKHPTWTNAQVRDRLESTATYLGNSFYYGKGLINVQAAAQ

SEQ ID NO: 70503 - protein, 275 aa, Bacillus subtilis
AQSVPYGISQIKAPALHSQGYTGSNVKVAVIDSGIDSSHPDLNVRGGASFVPSETNPYQDGSSHGTHVAGTIAALNNSIGVLGVSPSASLYAVKVLDSTGSGQYSWIINGIEWAISNNMDVINMSLGGPTGSTALKTVVDKAVSSGIVVAAAAGNEGSSGSTSTVGYPAKYESTIAVGAVNSSNQRASFSSAGSELDVMAPGVSIQSTLPGGTYGAYNGTSMATPHVAGAAALILSKHPTWTNAQVRDRLESTATYLGNSFYYGKGLINVQAAAQ

SEQ ID NO: 70504 - protein, 275 aa, Bacillus amyloliquefaciens
AQSVPYGVSQIKAPALHSQGYTGSNVKVAVIDSGIDSSHPDLKVAGGASMVPSETNPYQDNNSHGTHVAGTVAALNNSIGVLGVAPSASLYAVKVLGADGSGQYSWIINGIEWAIANNMDVINMSLGGPSGSAALKAAVDKAVASGVVVVAAAGNEGTSGSSSTVGYPGKYPSVIAVGAVDSSNQRASFSSVGPELDVMAPGVSIQSTLPGNKYGAYNGTSMASPHVAGAAALILSKHPNWTNTQVRSSLENTTTKLGDSFYYGKGLINVQAAAQ

SEQ ID NO: 70505 - protein, 275 aa, Bacillus subtilis
AQSVPYGISQIKAPALHSQGYTGSNVKVAVIDSGIDSSHPDLNVRGGASFVPSETNPYQDGSSHGTHVAGTIAALNNNIGVLGVAPSASLYAVKVLDSTGSGQYSWIINGIEWAISNNMDVINMSLGGPTGSTALKTVVDKAVSSGIVVAAAAGNEGSSGSTSTVGYPAKYPSTIAVGAVNSSNQRASFSSAGSELDVMAPGVSIQSTLPGGTYGAYSGTSMATPHVAGAAALILSKHPTWTNAQVRDRLESTATYLGPSFYYGKGLINVQAAAQ

SEQ ID NO: 70506 - protein, 275 aa, Bacillus subtilis
AQSVPYGISQIKAPALHSQGYTGSNVKVAVIDSGIDSSHPDLNVRGGASFVPSETNPYQDGSSHGTHVSGTIAALDNSIGVLGVAPSASLYAVKVLDSTGSGQYSWIINGIEWAISNNMDVINMSLGGPTGSTALKTVVDKAVSSGIVVAAAAGNEGSSGSTSTVQYPAKYPSTIAVGAVNSSNQRASFSSAGSELDVMAPGVSIQSTLPGGTYGAYNGTSMATPHVAGAAALILSKHPTWTNAQVRDRLESTATYLGNSFYYGKGLINVQAAAQ

SEQ ID NO: 70507 - protein, 275 aa, Bacillus subtilis
AQSVPYGISQIKAPALHSQGYTGSNVKVAVIDSGIDSSHPDLNVRGGASFVPSETNPYQNGSSHGTHVAGTIAALNNSIGVLGVAPSASLYAVKVLDSTGSGRYSWIINGIEWAISNNMDVINMSLGGPTGSTALKTVVDKAVSSGIVVVAAAGNEGSSGSTSTVGYPAKYPSTIAVGAVNSSNQRASFSSAGSELDVMAPGVSIQSTLPGGTYGAYSGTSMATPHVAGAAALILSKHPTWTNAQVRDRLESTATYLGNSFYYGKGLINVQAAAQ

SEQ ID NO: 70508 - protein, 275 aa, Bacillus subtilis
AQSVPYGISQIKAPALHSQGYTGSNVKVAVIDSGIDSSHPDLNVRGGASFVPSETNPYQDGSSHGTHVAGTIAALDNSIGVLGVSPSASLYAVKVLDSTGSGAISWIINGIEWAISNNMDVINMSLGGPTGSTALKTVVDKAVSSGIVVAAAAGNEGSSGSTSTVGYPAKYPSTIAVGAVNSSNQRASFSSAGSELDVMAPGVSIQSTLPGGTYGAYNGTSMATPHVAGAAALILSKHPTWTNAQVRDRLESTATYLGNSFYYGKGLINVQAAAQ

SEQ ID NO: 70509 - protein, 275 aa, Bacillus subtilis
AQSVPYGISQIKAPALHSQGYTGSNVKVAVIDSGIDSSHPDLNVRGGASFVPSETNPYQDGSSHGTHVAGTIAALNNNIGVLGVAPSASLYAVKVLDSTGSGQYSWIINGIEWAISNNMDVINMSLGGPTGSTALKTVVDKAVSSGIVVAAAAGNEGSSGSTSTVQYPAKYPSTIAVGAVNSSNQRASFSSAGSELDVMAPGVSIQSTLPGGTYGAYNGTSMATPHVAGAAALILSKHPTWTNAQVRDRLESTATYLGNSFYYGKGLINVQAAAQ

SEQ ID NO: 70510 - protein, 275 aa, Bacillus subtilis
AQSVPYGIEQIKAPALHSQGYTGSNVKVAVIDSGIDSSHEDLNVRGGASFVPSETNPYQDGSSHGTHVSGTIAALDNSIGVLGVAPSASLYAVKVLDSTGSGQYSWIINGIEWAISNNMDVINMSLGGPTGSTALKTVVDKAVSSGIVVAAAAGNEGSSGSTSTVGYPAKYPSTIAVGAVNSSNQRASFSSAGSELDVMAPGVSIQSTLPGGTYGAYNGTSMATPHVAGAAALILSKHPTWTNAQVRDRLESTATYLGNSFYYGKGLINVQAAAQ

SEQ ID NO: 70511 - protein, 275 aa, Bacillus subtilis
AQVVPYGISQIKAPALHSQGYTGSNVKVAVIDSGIDSSHPDLNVRGGASFVPSETNPYQDGSSHGTHVAGTIAALNNSIGVLGVAPSASLYAVKVLDSTGSGQYSWIINGIEWAISNNMDVINMSLGGPTGSTALKTVVDKAVSSGIVVAAAAGNEGSSGSTSTVQYPAKYPSTIAVGAVNSSNQRASFSSAGSELDVMAPGVSIQSTLPGGTYGAYNGTSMATPHVAGAAALILSKHPTWTNAQVRDRLESTATYLGPSFYYGKGLINVQAAAQ

SEQ ID NO: 70512 - protein, 275 aa, Bacillus subtilis
AQSVPYGISQIKAPALHSQGYTGSNVKVAVIDSGIDSSHPDLNVRGGASFVPSETNPYQDGSSHGTHVAGTIAALNNSIGVLGVSPSASLYAVKVLDSTGSGQYSWIINGIEWAISNNMDVINMSLGGPTDSTALKTVVDKAVSSGIVVAAAAGNEGSSGSTSTVGYPAKYDSTIAVGAVNSSNQRASFSSAGSELDVMAPGVSIQSTLPGGTYGAYNGTSMATPHVAGAAALILSKHPTWTNAQVRDRLESTATYLGNSFYYGKGLINVQAAAQ

SEQ ID NO: 70513 - protein, 275 aa, Bacillus subtilis
AQSVPYGISQIKAPALHSQGYTGSNVKVAVIDSGIDSSHPDLNVRGGASFVPSETNPYQDGSSHGTHVAGTIAALNNNIGVLGVAPSASLYAVKVLDSTGSGQYSWIINGIEWAISNNMDVINMSLGGPTGSTALKTVVDKAVSSGIVVAAAAGNEGSSGSTSTVQYPAKYPSTIAVGAVNSSNQRASFSSAGSELDVMAPGVSIQSTLPGGTYGAYNGTSMATPHVAGAAALILSKHPTWTNAQVRDRLESTATYLGPSFYYGKGLINVQAAAQ

SEQ ID NO: 70514 - protein, 275 aa, Bacillus subtilis
AQVVPYGISQIKAPALHSQGYTGSNVKVAVIDSGIDSSHPDLNVRGGASFVPSETNPYQDGSSHGTHVAGTIAALNNSIGVLGVAPSASLYAVKVLDSTGSGQYSWIINGIEWAISNNMDVINMSLGSPTGSTALKTVVDKAVSSGIVVAAAAGNEGSSGSTSTVGYPAKYPSTIAVGAVNSSNQRASFSSAGSELDVMAPGVSIQSTLPGGTYGAYNGTSMATPHVAGAAALILSKHPTWTNAQVRDRLESTATYLGNSFYYGKGLINVQAAAQ

SEQ ID NO: 70515 - protein, 275 aa, Bacillus subtilis
AQSVPYGIEQIKAPALHSQGYTGSNVKVAVIDSGIDSSHPDLNVRGGASFVPSETNPYQDGSSHGTHVAGTIAALNNSIGVLGVAPSASLYAVKVLDSTGSGQYSWIINGIEWAISNNMDVINMSLGGPTGSTALKTVVDKAVSSGIVVAAAAGNEGSSGSTSTVGYPAKYPSTIAVGAVNSSNQRASFSSAGSELDVMAPGVSIQSTLPGGTYGAYSGTSMATPHVAGAAALILSKHPTWTNAQVRDRLESTATYLGNSFYYGKGLINVQAAAQ

SEQ ID NO: 70516 - protein, 275 aa, Bacillus subtilis
AQSVPYGISQIKAPALHSQGYTGSNVKVAVIDSGIDSSHEDLNVRGGASFVPSETNPYQDGSSHGTHVAGTIAALDNNIGVLGVAPSASLYAVKVLDSTGSGQYSWIINGIEWAISNNMDVINMSLGGPTGSTALKTVVDKAVSSGIVVAAAAGNEGSSGSTSTVQYPAKYPSTIAVGAVNSSNQRASFSSAGSELDVMAPGVSIQSTLPGGTYGAYNGTSMATPHVAGAAALILSKHPTWTNAQVRDRLESTATYLGNSFYYGKGLINVQAAAQ

SEQ ID NO: 70517 - protein, 275 aa, Bacillus subtilis
AQVVPYGISQIKAPALHSQGYTGSNVKVAVIDSGIDSSHPDLNVRGGASFVPSETNPYQDGSSHGTHVAGTIAALNNNIGVLGVAPSASLYAVKVLDSTGSGQYSWIINGIEWAISNNMDVINMSLGGPTGSTALKTVVDKAVSSGIVVAAAAGNEGSSGSTSTVGYPAKYPSTIAVGAVNSSNQRASFSSAGSELDVMAPGVSIQSTLPGGTYGAYSGTSMATPHVAGAAALILSKHPTWTNAQVRDRLESTATYLGNSFYYGKGLINVQAAAQ

SEQ ID NO: 70518 - protein, 275 aa, Bacillus subtilis
AQSVPYGISQIKAPALHSQGYTGSNVKVAVIDSGIDSSHPDLNVRGGASFVPSETNPYQDGSSHGTHVAGTIAALNNSIGVLGVAPSASLYAVKVLDSTGSGQYSWIINGIEWAISNNMDVINMSLGGPTGSTALKTVVDKAVSSGIVVAAAAGNEGSSGSTSTVGYPAKYPSTIAVGAVNSSNQRASFSSAGSELDVMAPGVSIQSTLPGGTYGAYSGTSMATPHVAGAAALILSKHPTWTNAQVRDRLESTATYLGNSFYYGKGLINVQAAAQ

SEQ ID NO: 70519 - protein, 275 aa, Bacillus subtilis
AQSVPYGISQIKAPALHSQGYTGSNVKVAVIDSGIDSSHPDLNVRGGASFVPSETNPYQDGSSHGTHVAGTIAALDNSIGVLGVAPSASLYAVKVLDSTGSGQYSWIINGIEWAISNNMDVINMSLGGPTGSTALKTVVDKAVSSGIVVAAAAGNEGSSGSTSTVQYPAKYPSTIAVGAVNSSNQRASFSSAGSELDVMAPGVSIQSTLPGGTYGAYSGTSMATPHVAGAAALILSKHPTWTNAQVRDRLESTATYLGNSFYYGKGLINVQAAAQ

SEQ ID NO: 70520 - protein, 275 aa, Bacillus subtilis
AQSVPYGISQIKAPALHSQGYTGSNVKVAVIDSGIDSSHEDLNVRGGASFVPSETNPYQDGSSHGTHVAGTIAALNNSIGVLGVAPSASLYAVKVLDSTGSGQYSWIINGIEWAISNNMDVINMSLGGPTGSTALKTVVDKAVSSGIVVAAAAGNEGSSGSTSTVGYPAKYPSTIAVGAVNSSNQRASFSSAGSELDVMAPGVSIQSTLPGGTYGAYNGTSMATPHVAGAAALILSKHPTWTNAQVRDRLESTATYLGNSFYYGKGLINVQAAAQ

SEQ ID NO: 70521 - protein, 275 aa, Bacillus subtilis
AQSVPYGISQIKAPALHSQGYTGSNVKVAVIDSGIDSSHPDLNVRGGASFVPSETNPYQDGSSHGTHVAGTIAALDNNIGVLGVAPSASLYAVKVLDSTGSGQYSWIINGIEWAISNNMDVINMSLGGPTGSTALKTVVDKAVSSGIVVAAAAGNEGSSGSTSTVQYPAKYPSTIAVGAVNSSNQRASFSSAGSELDVMAPGVSIQSTLPGGTYGAYSGTSMATPHVAGAAALILSKHPTWTNAQVRDRLESTATYLGNSFYYGKGLINVQAAAQ

SEQ ID NO: 70522 - protein, 275 aa, Bacillus subtilis
AQVVPYGISQIKAPALHSQGYTGSNVKVAVIDSGIDSSHEDLNVRGGASFVPSETNPYQDGSSHGTHVAGTIAALDNSIGVLGVAPSASLYAVKVLDSTGSGQYSWIINGIEWAISNNMDVINMSLGGPTGSTALKTVVDKAVSSGIVVAAAAGNEGSSGSTSTVGYPAKYPSTIAVGAVNSSNQRASFSSAGSELDVMAPGVSIQSTLPGGTYGAYSGTSMATPHVAGAAALILSKHPTWTNAQVRDRLESTATYLGNSFYYGKGLINVQAAAQ

SEQ ID NO: 70523 - protein, 274 aa, Bacillus subtilis
AQSVPYGISQIKAPALHSQGYTGSNVKVAVIDSGIDSSHPDLNVRGGASFVPSETNPYQDGSSHGTHVAGTIAALNNSIGVLGVAPSASYAVKVLDSTGSGQYSWIINGIEWAISNNMGVINMSLGGPSGSTALKTVVDKAVSSGIVVAAAAGNEGSSGSSSTVGYPAKYPSTIAVGAVNSSNQRASFSSAGSELDVMAPGVSIQSTLPGGTYGAYNGTSMATPHVAGAAALILSKHPTWTNAQVRDRLESTATYLGNSFYYGKGLINVQAAAQ

SEQ ID NO: 70524 - protein, 274 aa, Bacillus subtilis
AQSVPYGISQIKAPALHSQGYTGSNVKVAVIDSGIDSSHPDLNVRGGASFVPSETNPYQDGSSHGTHVAGTIAALNNSIGVLGVPSASLYAVKVLDSTGSGQYSWIINGIEWAISNNMDVINMSLGGPTGSTALKTVVDKAVSSGIVVAAAAGNEGSSGSTSTVGYPAKYPSTIAVGAVNSSNQRASFSSAGSELDVMAPGVSIQSTLPGGTYGAYNGTCMATPHVAGAAALILSKHPTWTNAQVRDRLESTATYLGNSFYYGKGLINVQAAAQ

SEQ ID NO: 70525 - protein, 275 aa, Bacillus amyloliquefaciens
AQSVPYGVSQIKAPALHSQGYTGSNVKVAVIDSGIDSSHPDLKVAGGASMVPSETNPFQDNNSHGTHVAGTVAALNNSIGVLGVAPSASLYAVKVLGNLGSGQYSWIINGIEWAIANNMDVINMSLGGPSGSAALKAAVDKAVASGVVVVAAAGNEGTSGSSSTVGYPGKYPSVIAVGAVDSSNQRASFSSVGPELDVMAPGVSIQSTLPGNKYGALNGTSMASPHVAGAAALILSKHPNWTNTQVRSSLENTTTKLGDSFYYGKGLINVQAAAQ

SEQ ID NO: 70526 - protein, 275 aa, Bacillus amyloliquefaciens
AQSVPYGVSQIKAPALHSQGYTGSNVKVAVIDSGIDSSHPDLKVAGGASMVPSETNPFQDNNSHGTHVAGTVAALNNSIGVLGVAPSASLYAVKVLSHCGSGQYSWIINGIEWAIANNMDVINMSLGGPSGSAALKAAVDKAVASGVVVVAAAGNEGTSGSSSTVGYPGKYPSVIAVGAVDSSNQRASFSSVGPELDVMAPGVSIQSTLPGNKYGALNGTSMASPHVAGAAALILSKHPNWTNTQVRSSLENTTTKLGDSFYYGKGLINVQAAAQ

SEQ ID NO: 70527 - protein, 275 aa, Bacillus amyloliquefaciens
AQSVPYGVSQIKAPALHSQGYTGSNVKVAVIDSGIDSSHPDLKVAGGASMVPSETNPFQDNNSHGTHVAGTVAALNNSIGVLGVAPSASLYAVKVLGADGSGQYSWIIGGIEWAITNNMDVINMSLGGPSGSAALKAAVDKAVASGVVVVAAAGNEGTSGSSSTVGYPGKYPSVIAVGAVDSSNQRASFSSVGPELDVMAPGVSIQSTLPGNKYGAYNGTSMASPHVAGAAALILSKHPNWTVTQVRSSLENTTTRLGDSFYYGKGLINVQAAAQ

SEQ ID NO: 70528 - protein, 275 aa, Bacillus amyloliquefaciens
AQSVPYGVSQIKAPALHSQGYTGSNVKVAVIDSGIDSSHPDLKVAGGASMVPSETNPFQDNNSHGTHVAGTVAALNNSIGVLGVAPSASLYAVKVLRGNGSGQYSWIINGIEWAIANNMDVINMSLGGPSGSAALKAAVDKAVASGVVVVAAAGNEGTSGSSSTVGYPGKYPSVIAVGAVDSSNQRASFSSVGPELDVMAPGVSIQSTLPGNKYGALNGTSMASPHVAGAAALILSKHPNWTNTQVRSSLENTTTKLGDSFYYGKGLINVQAAAQ

SEQ ID NO: 70529 - protein, 275 aa, Bacillus amyloliquefaciens
AQSVPYGVSQIKAPALHSQGYTGSNVKVAVIDSGIDSSHPDLKVAGGASMVPSETNPFQDNNSHGTHVAGTVAALNNSIGVLGVAPSASLYAVKVLGDGGSGQYSWIINGIEWAIANNMDVINMSLGGPSGSAALKAAVDKAVASGVVVVAAAGNEGTSGSSSTVGYPGKYPSVIAVGAVDSSNQRASFSSVGPELDVMAPGVSIQSTLPGNKYGALNGTSMASPHVAGAAALILSKHPNWTNTQVRSSLENTTTKLGDSFYYGKGLINVQAAAQ

SEQ ID NO: 70530 - protein, 275 aa, Bacillus amyloliquefaciens
AQSVPYGVSQIKAPALHSQGYTGSNVKVAVIDSGIDSSHPDLKVAGGASMVPSETNPFQDNNSHGTHVAGTVAALNNSIGVLGVAPSASLYAVKVLSRVGSGQYSWIINGIEWAIANNMDVINMSLGGPSGSAALKAAVDKAVASGVVVVAAAGNEGTSGSSSTVGYPGKYPSVIAVGAVDSSNQRASFSSVGPELDVMAPGVSIQSTLPGNKYGALNGTSMASPHVAGAAALILSKHPNWTNTQVRSSLENTTTKLGDSFYYGKGLINVQAAAQ

SEQ ID NO: 70531 - protein, 275 aa, Bacillus amyloliquefaciens
AQSVPYGVSQIKAPALQSQGYTGSNVKVAVIDSGIDSSHPDLKVAGGASMVPSETNPFQDNNSHGTHVAGTVAALNNSIGVLGVAPSASLYAVKVLGADGSGQYSWIINGIEWAIANNMDVINMSLRGGSGSAALKAAVDKAVASGVVVVAAAGNEGTSGSSSTVGYPGKYPSVIAVGAVDSSNQRASFSSVGPELDVMAPGVSIQSTLPGNKYGALNGTSMASPHVAGAAALILSKHPNWTNTQVRSSLENTTTKLGDSFYYGKGLINVQAAAQ

SEQ ID NO: 70532 - protein, 275 aa, Bacillus amyloliquefaciens
AQSVPYGVSQIKAPALHSQGYTGSNVKVAVIDSGIDSSHPDLKVAGGASMVPSETNPFQDNNSHGTHVAGTVAALNNSIGVLGVAPSASLYAVKVLGRLGSGQYSWIINGIEWAIANNMDVINMSLGGPSGSAALKAAVDKAVASGVVVVAAAGNEGTSGSSSTVGYPGKYPSVIAVGAVDSSNQRASFSSVGPELDVMAPGVSIQSTLPGNKYGALNGTSMASPHVAGAAALILSKHPNWTNTQVRSSLENTTTKLGDSFYYGKGLINVQAAAQ

SEQ ID NO: 70533 - protein, 275 aa, Bacillus amyloliquefaciens
AQSVPYGVSQIKAPALHSQGYTGSNVKVAVIDSGIDSSHPDLKVAGGASMVPSETNPFQDNNSHGTHVAGTVAALNNSIGVLGVAPSASLYAVKVLGADGSGQYSWIINGIEWAIANNMDVINMSLGGVSGSAALKAAVDKAVASGVVVVAAAGNEGTSGSSSTVGYPGKYPSVIAVGAVDSSNQRASFSSVGPELDVMAPGVSIQSTLPGNKYGALNGTSMASPHVAGAAALILSKHPNWTNTQVRSSLENTTTKLGDSFYYGKGLINVQAAAQ

SEQ ID NO: 70534 - protein, 275 aa, Bacillus amyloliquefaciens
AQSVPYGVSQIKAPALHSQGYTGSNVKVAVIDSGIDSSHPDLKVAGGASMVPSETNPFQDNNSHGTHVAGTVAALNNSIGVLGVAPSASLYAVKVLGADGSGQYSWIIRGIEWAIANNMDVINMSLGGPSGSAALKAAVDKAVASGVVVVAAAGNEGTSGSSSTVGYPGKYPSVIAVGAVDSSNQRASFSSVGPELDVMAPGVSIQSTLPGNKYGALNGTSMASPHVAGAAALILSKHPNWTNTQVRSSLENTTTKLGDSFYYGKGLINVQAAAQ

SEQ ID NO: 70535 - protein, 275 aa, Bacillus sp.
AQTVPWGIPHIKADKAHAAGVTGSGVKVAILDTGIDAQHADLNVKGGASFVSGEPNALQDGNGHGTHVAGTVAALNNTTGVLGVAYNADLYAVKVLSASASGTLSGIAQGIEWSISSGMNVINMSLGGSSGSTALQQACNNAYNRGAVVIAAAGNSGTSGNRNTMGYPARYSSVIAVGAVSSNNTRASFSSVGSELEVMAPGVNILSTTPGNNYASFNGTSMAAPHVAGAAALIKAKYPSMTNVQIRERLKNTATPLGDPFFYGKGVINVEKALQ

SEQ ID NO: 70536 - protein, 275 aa, Bacillus amyloliquefaciens
AQSVPYGVSQIKAPALHSQGYTGSNVKVAVIDSGIDSSHPDLKVAGGASMVPSETNPFQDNNSHGTHVAGTVAALNNSIGVLGVAPSASLYAVKVLGADGSGGYSWIINGIEWAIANNMDVINMSLGGPSGSAALKAAVDKAVASGVVVVAAAGNEGTSGSSSTVGYPGKYPSVIAVGAVDSSNQRASFSSVGPELDVMAPGVSIQSTLPGNKYGALNGTSMASPHVAGAAALILSKHPNWTNTQVRSSLENTTTKLGDSFYYGKGLINVQAAAQ

SEQ ID NO: 70537 - protein, 275 aa, Bacillus sp.
AQTVPWGIPHIKADKAHAAGVTGSGVKVAILDTGIDANHADLNVKGGASFVTGEPNALQDGNGHGTHVAGTVAALDNTTGVLGVAYNADLYAVKVLSASGSGTLSGIAQGIEWSISNRMNVINMSLGVMHGSTALQQACNNAYNRGIVVIAAAGNDGSSGNRNTMDYPARYSSVIAVGAVSSNNTRASFSSVGSELEVMAPGVNILSTTPGNNYASRNGTSMAAPHVAGAAALIKAKYPSMTNVQIRNRLKNTATELGDPFFYGKGVINVEKALQ

SEQ ID NO: 70538 - protein, 275 aa, Bacillus amyloliquefaciens
AQSVPYGVSQIKAPALHSQGYTGSNVKVAVIDSGIDSSHPDLKVAGGASMVPSETNPFQDNNSHGTHVAGTVAALNNSIGVLGVAPSASLYAVKVLGSGSSGQYSWIINGIEWAIANNMDVINMSLGGPSGSAALKAAVDKAVASGVVVVAAAGNEGTSGSSSTVGYPGKYPSVIAVGAVDSSNQRASFSSVGPELDVMAPGVSIQSTLPGNKYGALNGTSMASPHVAGAAALILSKHPNWTNTQVRSSLENTTTKLGDSFYYGKGLINVQAAAQ

SEQ ID NO: 70539 - protein, 275 aa, Bacillus amyloliquefaciens
AQSVPYGVSQIKAPALHSQGYTGSNVKVAVLDSGIDSSHPDLKVAGGASMVPSETNPFQDNNSHGTHVAGTVAALNNSIGVLGVAPSASLYAVKVLGADGSGQYSWIINGIEWAIANNMDVINMSLGGPSGSAALKAAVDKAVASGVVVVAAAGNEGTSGSSSTVGYPGKYPSVIAVGAVDSSNQRASFSSVGPELDVMAPGVSIQSTLPGNKYGAYNGTSMASPHVAGAAALILSKHPNWTNTQVRSSLENTTTKLGDSFYYGKGLINVQAAAQ

SEQ ID NO: 70540 - protein, 275 aa, Bacillus sp.
AQTVPWGIPHIKADKAHAAGVTGSGVKVAILDTGIDANHADLNVKGGASFVTDEPNALQDGNGHGTHVAGTVAALDNTTGVLGVAYNADLYAVKVLSASGSGTLSGIAQGIEWSISNGMNVINMSLGDFYGSTALQQACNNAYNRGIVVIAAAGNNGSSGNRNTMGYPARYSSVIAVGAVSSNNTRASFSSVGSELEVMAPGVNILSTTPGNNYASRNGTSMAAPHVAGAAALIKAKYPSMTNVQIRERLKNTATELGDPFFYGKGVINVEKALQ

SEQ ID NO: 70541 - protein, 275 aa, Bacillus amyloliquefaciens
AQSVPYGVSQIKAPALHSQGYTGSNVKVAVIDSGIDSSHPDLKVAGGASMVPSETNPFQDNNSHGTHVAGTVAALNNSIGVLGVAPSASLYAVKVLGNGGSGQYSWIINGIEWAIANNMDVINMSLGGPSGSAALKAAVDKAVASGVVVVAAAGNEGTSGSSSTVGYPGKYPSVIAVGAVDSSNQRASFSSVGPELDVMAPGVSIQSTLPGNKYGALNGTSMASPHVAGAAALILSKHPNWTNTQVRSSLENTTTKLGDSFYYGKGLINVQAAAQ

SEQ ID NO: 70542 - protein, 275 aa, unidentified
AQSVPYGVSQIKAPALHSQGYTGSNVKVAVIDSGIDSSHPDLKVAGGASMVPSETNPFQDNNSHGTHVAGTVAALNNSIGVLGVAPSASLYAVKVLGADGSGQYSWIINGIEWAIANNMDVINMSLGGPSGSAALKAAVDKAVASGVVVVAAAGNEGTSGSSSTVGYPGKYPSVIAVGAVDSSNQRASFSSVGPELDVMAPGESIESTLPGNKYGELNGTSMASPHVAGAAALILSKHPNWTNTQVRSSLENTTTKLGDSFYYGKGLINVQAAAQ

SEQ ID NO: 70543 - protein, 275 aa, Bacillus amyloliquefaciens
AQSVPYGVSQIKAPALHSQGYTGSNVKVAVIDSGIDSSHPDLKVAGGASMVPSETNPFQDNNSHGTHVAGTVAALNNSIGVLGVAPSASLYAVKVLGADGSGQYSWIINGIEWAIANNMDVINMSLGGPSGSAALKAAVDKAVASGVVVVAAAGNEGTSGSSSTVGYPGKYPSVIAVGAVDSSNQRASFSSVGPELDVMAPGVSIQSTLPGNKYGAYNGTSMASPHVAGAAALILSKHPNWTNTQVRSSLENTTTKLGDSFYYGKGLINVEAAAQ

SEQ ID NO: 70544 - protein, 275 aa, Bacillus amyloliquefaciens
AQSVPYGVSQIKAPALHSQGYTGSNVKVAVIDSGIDSSHPDLKVAGGASMVPSETNPFQDNNSHGTHVAGTVAALNNSIGVLGVAPSASLYAVKVLGHDGSGQYSWIINGIEWAIANNMDVINMSLGGPSGSAALKAAVDKAVASGVVVVAAAGNEGTSGSSSTVGYPGKYPSVIAVGAVDSSNQRASFSSVGPELDVMAPGVSIQSTLPGNKYGALNGTSMASPHVAGAAALILSKHPNWTNTQVRSSLENTTTKLGDSFYYGKGLINVQAAAQ

SEQ ID NO: 70545 - protein, 275 aa, Bacillus amyloliquefaciens
AQSVPYGVSQIKAPALHSQGYVGSNVKVAVIDSGIDSSHPDLKVAGGASMVPSETNPFQDNNSHGTHVAGTVAALNNNIGVLGVAPSASLYAVKVLGADGSGQYSWIINGIEWAIANNMDVINMSLGGPSGSAALKAAVDKAVASGVVVVAAAGNEGTSGSSSTVGYPGKYPSVIAVGAVDSSNQRASFSSVGPELDVMAPGVSIESTLPGNNYGALNGTSMASPHVAGAAALILSKHPNWTNTQVRSSLENTTTKLGDSFYYGKGLINVQAAAQ

SEQ ID NO: 70546 - protein, 275 aa, Bacillus amyloliquefaciens
AQSVPYGVSQIKAPALHSQGYTGSNVKVAVIDSGIDSSHPDLKVAGGASMVPSETNPFQDNNSHGTHVAGTVAALNNSIGVLGVAPSASLYAVKVLGARGSGQYSWIINGIEWAIANNMDVINMSLGGPSGSAALKAAVDKAVASGVVVVAAAGNEGTSGSSSTVGYPGKYPSVIAVGAVDSSNQRASFSSVGPELDVMAPGVSIQSTLPGNKYGALNGTSMASPHVAGAAALILSKHPNWTNTQVRSSLENTTTKLGDSFYYGKGLINVQAAAQ

SEQ ID NO: 70547 - protein, 275 aa, Bacillus sp.
AQTVPWGIPHIKADKAHAAGVTGSGVKVAILDTGIDANHADLNVKGGASFVFGEPNALQDGNGHGTHVAGTVAALDNTTGVLGVAYNADLYAVKVLSASGSGTLSGIAQGIEWSISNRMNVINMSLGDFYGSTALQQACNNAYNRGIVVIAAAGNNGSSGNRNTMDYPARYSSVIAVGAVSSNNTRASFSSVGSELEVMAPGVNILSTTPGNNYASFNGTSMAAPHVAGAAALIKAKYPSMTNVQIRNRLKNTATNLGDPFFYGKGVINVESALQ

SEQ ID NO: 70548 - protein, 275 aa, Bacillus amyloliquefaciens
AQSVPYGVSQIKAPALHSQGYTGSNVKVAVIDSGIDSSHPDLKVAGGASMVPSETNPFQDNNSHGTHVAGTVAALNNSIGVLGVAPSASLYAVKVLRRDGSGQYSWIINGIEWAIANNMDVINMSLGGPSGSAALKAAVDKAVASGVVVVAAAGNEGTSGSSSTVGYPGKYPSVIAVGAVDSSNQRASFSSVGPELDVMAPGVSIQSTLPGNKYGALNGTSMASPHVAGAAALILSKHPNWTNTQVRSSLENTTTKLGDSFYYGKGLINVQAAAQ

SEQ ID NO: 70549 - protein, 275 aa, Bacillus amyloliquefaciens
AQSVPYGVSQIKAPALHSQGYTGSNVKVAVIDSGIDSSHPDLKVAGGASMVPSETNPFQDNNSHGTHVAGTVAALNNSIGVLGVAPSASLYAVKVLHRNGSGQYSWIINGIEWAIANNMDVINMSLGGPSGSAALKAAVDKAVASGVVVVAAAGNEGTSGSSSTVGYPGKYPSVIAVGAVDSSNQRASFSSVGPELDVMAPGVSIQSTLPGNKYGALNGTSMASPHVAGAAALILSKHPNWTNTQVRSSLENTTTKLGDSFYYGKGLINVQAAAQ

SEQ ID NO: 70550 - protein, 275 aa, Bacillus sp.
AQTVPWGIPHIKADKAHAAGVTGSGVKVAILDTGIDANHADLNVKGGASFVSDEPNALQDGNGHGTHVAGTVAALNNTTGVLGVAYNADLYAVKVLSASGSGTLSGIAQGIEWSISNRMNVINMSLGGSSGSTALQQACNNAYNRGIVVIAAAGNSGSSGNRNTMDYPARYSSVIAVGAVSSNNTRASFSSVGSELEVMAPGVNILSTTPGNNYASFNGTSMAAPHVAGAAALIKAKYPSMTNVQIRERLKNTATNLGDPFFYGKGVINVESALQ

SEQ ID NO: 70551 - protein, 275 aa, Bacillus amyloliquefaciens
AQSVPYGVSQIKAPALHSQGYTGSNVKVAVIDSGIDSSHPDLKVAGGASMVPSETNPTQDNNSHGTHVAGTVAALNNSIGVLGVAPSASLYAVKVLGADGSGQYSWIINGIEWAIANNMDVINMSLGGPSGSAALKAAVDKAVASGVVVVAAAGNEGTSGSSSTVGYPGKYPSVIAVGAVDSSNQRASFSSVGPELDVMAPGVSIQSTLPGNKYGAYNGTSMASPHVAGAAALILSKHPNWTNTQVRSSLENTTTKLGDSFYYGKGLINVQAAAQ

SEQ ID NO: 70552 - protein, 275 aa, Bacillus amyloliquefaciens
AQSVPYGVSQIKAPALHSQGYTGSNVKVAVIDSGIDSSHPDLKVAGGASMVPSETNPFQDNNSHGTHVAGTVAALNNSIGVLGVAPSASLYAVKVLGADGSGQYSWIINGIEWAIANNMDVINMSLGGPSGSAALKAAVDKAVASGVVVVAAAGNEGTSGSSSTVGYPGKYPSVIAVGAVDSSNQRASFSSVGPELDVMAPGVSIQSTLPGNKYGALNGTSMASPHVAGAAALILSKHPNRTNTQVRSSLENTTTKLGDSFYYGKGLINVQAAAQ

SEQ ID NO: 70553 - protein, 275 aa, Bacillus amyloliquefaciens
AQSVPYGVSQIKAPALHSQGYTGSNVKVAVIDSGIDSFHPDLKVAGGASMVPSETNPFQDNNSHGTHVAGTVAALNNSIGVLGVAPSASLYAVKVLGRSGSGQYSWIINGIEWAIANNMDVINMSLGGPSGSAALKAAVDKAVASGVVVVAAAGNEGTSGSSSTVGYPGKYPSVIAVGAVDSSNQRASFSSVGPELDVMAPGVSIQSTLPGNKYGALNGTSMASPHVAGAAALILSKHPNWTNTQVRSSLENTTTKLGDSFYYGKGLINVQAAAQ

SEQ ID NO: 70554 - protein, 275 aa, Bacillus amyloliquefaciens
AQSVPYGVSQIKAPALHSQGYTGSNVKVAVIDSGIDSSHPDLKVAGGASMVPSETNPFQDNNSHGTHVAGTVAALNNSIGVLGVAPSASLYAVKVLLHDGSGQYSWIINGIEWAIANNMDVINMSLGGPSGSAALKAAVDKAVASGVVVVAAAGNEGTSGSSSTVGYPGKYPSVIAVGAVDSSNQRASFSSVGPELDVMAPGVSIQSTLPGNKYGALNGTSMASPHVAGAAALILSKHPNWTNTQVRSSLENTTTKLGDSFYYGKGLINVQAAAQ

SEQ ID NO: 70555 - protein, 275 aa, Bacillus amyloliquefaciens
AQSVPYGVSQIKAPALHSQGYTGSNVKVAVIDSGIDSSHPDLKVAGGASMVPSETNPFQDNNSHGTHVAGTVAALNNSIGVLGVAPSASLYAVKVLGADGSGQYSWIINGIEWAIANNMDVINMSLGGPSGSAALKAAVDKAVASGVVVVAAAGNEGTSGSSSTVGYPAKYPSVIAVGAVDSSNQRASFSSVGPELDVMAPGVSIQSTLPGNKYGAYNGTSMASPHVAGAAALILSKHPNWTNTQVRSSLENTTTKLGDSFYYGKGLINVQAAAQ

SEQ ID NO: 70556 - protein, 275 aa, Bacillus amyloliquefaciens
AQSVPYGVSQIKAPALYSQGYTGSNVKVAVIDSGIDSSHPDLKVAGGASMVPSETNPFQDNNSHGTHVAGTVAALNNSIGVLGVAPSASLYAVKVLGADGSGQYSWIINGIEWAIANNMDVINMSLGGRSGSAALKAAVDKAVASGVVVVAAAGNEGTSGSSSTVGYPGKYPSVIAVGAVDSSNQRASFSSVGPELDVMAPGVSIQSTLPGNKYGALNGTSMASPHVAGAAALILSKHPNWTNTQVRSSLENTTTKLGDSFYYGKGLINVQAAAQ

SEQ ID NO: 70557 - protein, 275 aa, Synthetic construct
AQVVPWGIPHIKADKAHASGVTGSGVKVAVLDTGIDANHEDLNVKGGASFVSGEPNALQDGNGHGTHVAGTVAALNNTTGVLGVAYNAFLYAVKVLGASGSGTLSGIAQGIEWSIANDMDVINMSLGISTGSTALQQACNNAYASGIVVVAAAGNSGSNGKRNTMGYPARYSSVIAVGAVDSSNQRASFSSVGSELEVMAPGVSILSTTPGNNYESFNGTSMASPHVAGAAALIKAKYPSMTNVQIRNKLKNTATNLGDAFYYGHGVINVEKALQ

SEQ ID NO: 70558 - protein, 275 aa, Bacillus amyloliquefaciens
AQSVPYGVSQIKAPALHSQGYTGSNVKVAVIDSGIDSSHPDLKVAGGASMVPSETNPFQDNNSHGTHVAGTVAALNNSIGVLGVAPSASLYAVKVLGADGSGQYSWIIQGIEWAIANQMDVINMSLGGPSGSAALKAAVDKAVASGVVVVAAAGNEGTSGSSSTVGYPGKYPSVIAVGAVDSSNQRASFSSVGPELDVMAPGVSIQSTLPGNQYGALNGTSMASPHVAGAAALILSKHPNWTNTQVRSSLENTTTKLGDSFYYGKGLINVQAAAQ

SEQ ID NO: 70559 - protein, 275 aa, Synthetic construct
AQVVPWGIPHIKADKAHASGVTGSGVKVAVLDTGIDANHADLNVKGGASFVSGEPNALQDGNGHGTHVAGTVAALNNNTGVLGVAYNAFLYAVKVLGASGSGTLSGIAQGIEWSIANDMDVINMSLGISTGSTALQQACNNAYASGIVVVAAAGNSGSNGKRNTMGYPARYSSVIAVGAVDSSNNRASFSSVGSELEVMAPGVSILSTTPGNNYESFNGTSMASPHVAGAAALIKAKYPSMTNVQIRNKLKNTATNLGDAFYYGHGVINVEKALQ

SEQ ID NO: 70560 - protein, 275 aa, Bacillus amyloliquefaciens
AQSVPYGVSQIKAPALHSQGYTGSNVKVAVIDSGIDSSHPDLKVAGGASMVPSETNPFQDNNSHGTHVAGTVAALNNSIGVLGVAPSASLYAVKVLGALGSGQYSWIINGIEWAIANDMDVINMSLGGPSGSAALKAAVDKAVASGVVVVAAAGNEGTSGSSSTVGYPGKYPSVIAVGAVDSSNQRASFSSVGPELDVMAPGVSIQSTLPGNKYGALNGTSMASPHVAGAAALILSKHPNWTNTQVRSSLENTTTKLGDSFYYGKGLINVQAAAQ

SEQ ID NO: 70561 - protein, 275 aa, Bacillus amyloliquefaciens
AQSVPYGVSQIKAPALHSQGYTGGNVKVAVIDTGIDSSHPDLKVAGGASMVPGETNPFQDGNSHGTHVAGTVAALNNNIGVLGVAPSTSLYAVKVLGADGNGQYSWIIGGIEWAITNNMDVINMSLGSPSGSAALKAAVDKAVASGVVVVAAAGNEGTSGSSSTVGYPGKYPSVIAVGAVDSSNQRASFSSVGPELDVMAPGVSIQSTLPGNKYGAQSGTSMASPHVAGAAALILSKHPNWTVTQVRSSLENTTTKLGDSFYYGKGLINVQAAAQ

SEQ ID NO: 70562 - protein, 275 aa, Bacillus amyloliquefaciens
AQSVPYGVSQIKAPALHSQGYTGSNVKVAVIDSGIDSSHPDLKVAGGASMVPSETNPFQDNNSHGTHVAGTVAALNNSIGVLGVAPSASLYAVKVLCGNGSGQYSWIINGIEWAIANNMDVINMSLGGPSGSAALKAAVDKAVASGVVVVAAAGNEGTSGSSSTVGYPGKYPSVIAVGAVDSSNQRASFSSVGPELDVMAPGVSIQSTLPGNKYGALNGTSMASPHVAGAAALILSKHPNWTNTQVRSSLENTTTKLGDSFYYGKGLINVQAAAQ

SEQ ID NO: 70563 - protein, 275 aa, Bacillus amyloliquefaciens
AQSVPYGVSQIKAPALHSQGYTGSNVKVAVIDSGIDSSHPDLKVAGGASMVPSETNPFQDNNSHGTHVAGTVAALNNSIGVLGVAPSASLYAVKVLGHYGSGQYSWIINGIEWAIANNMDVINMSLGGPSGSAALKAAVDKAVASGVVVVAAAGNEGTSGSSSTVGYPGKYPSVIAVGAVDSSNQRASFSSVGPELDVMAPGVSIQSTLPGNKYGALNGTSMASPHVAGAAALILSKHPNWTNTQVRSSLENTTTKLGDSFYYGKGLINVQAAAQ

SEQ ID NO: 70564 - protein, 275 aa, Bacillus amyloliquefaciens
AQSVPYGVSQIKAPALHSQGYTGGNVKVAVIDTGIDSSHPDLKVAGGASMVPGETNPFQDNNGHGTHVAGTVAALNNNIGVLGVAPSASLYAVKVLGADGNGQYSWIIGGIEWAIANNMDVINMSLGSPSGSAALKAAVDKAVASGVVVVAAAGNEGTSGSSSTVGYPAKYPSVIAVGAVDSSNQRASFSSVGPELDVMAPGVSIQSTLPGNKYGAQSGTSMASPHVAGAAALILSKHPNWTVTQVRSSLENTTTKLGDSFYYGKGLINVQAAAQ

SEQ ID NO: 70565 - protein, 275 aa, Bacillus amyloliquefaciens
AQSVPYGVSQIKATALHSQGYTGSNVKVAVIDSGIDSSHPDLKVAGGASMVPGESXAFQDNNSHGTHVAGTVAALNNSIGVLGVAPSASLYAVKVLGADGSGQYSWIINGIEWAIANNMDVINMSLGGPSGSAALKAAVDKAVASGVVVVAAAGNEGTSGSSSTVGYPGKYPSVIAVGAVDSSNQRASFSSVGPELDVMAPGVSIQSTLPGNKYGAYNGTSMASPHVAGAAALILSKHPNWTNTQVRSSLENTTTKLGDSFYYGKGLINVQAAAQ

SEQ ID NO: 70566 - protein, 275 aa, Bacillus amyloliquefaciens
AQSVPYGVSQIKAPALHSQGYTGSNVKVAVIDSGIDSSHPDLKVAGGASMVPSETNPFQDNNSHGTHVAGTVAALNNSIGVLGVAPSASLYAVKVLGADGSGQYSWIIRGIEWAIANNMDVINMSLGGPSGSAALKAAVDKAVASGVVVVAAAGNEGTSGSSSTVGYPGKYPSVIAVGAVDSSNQRASFSSVGPELDVMAPGVSIQSTLPGNKYGALNGTSMASPHVAGAAALILSKHPNWTNTQVRDSLENTTTKLGDSFYYGKGLINVQAAAQ

SEQ ID NO: 70567 - protein, 275 aa, Bacillus sp.
AQTVPWGIPHIKADKAHAAGVTGSGVKVAILDTGIDANHADLNVKGGASFVTGEPNALQDGNGHGTHVAGTVAALNNTTGVLGVAYNADLYAVKVLSASGSGTLSGIAQGIEWSISNGMNVINMSLGGSSGSTALQQACNNAYNRGIVGIAAAGNNGSSGNRNTMHYPARYSSVIAVGAVSSNNTRASFSSVGSELEVMAPGVNILSTTPGNNYASRNGTSMAAPHVAGAAALIKAKYPSMTNVQIRERLKNTATNLGDPFFYGKGVINVESALQ

SEQ ID NO: 70568 - protein, 275 aa, Synthetic construct
AQVVPWGIPHIKADKAHASGVTGSGVKVAVLDTGIDANHADLNVKGGASFVSGEPNALQDGNGHGTHVSGTVAALNNTTGVLGVAYNAFLYAVKVLGASGSGTLSGIAQGIEWSIANDMDVINMSLGSSTGSTALQQACNNAYASGIVVVAAAGNSGSNGKRNTMGYPARYSSVIAVGAVDSSNNRASFSSVGSELEVMAPGVSILSTTPGNNYESFNGTSMASPHVAGAAALIKAKYPSMTNVQIRNKLKNTATNLGDAFYYGHGVINVEKALQ

SEQ ID NO: 70569 - protein, 275 aa, Bacillus sp.
AQTVPWGIPHIKADKAHAAGVTGSGVKVAILDTGIDANHADLNVKGGASFVSGEPNALQDGNGHGTHVAGTVAALDNTTGVLGVAYNADLYAVKVLSASGSGTLSGIAQGIEWSISNRMNVINMSLGVMHGSTALQQACNNAYNRGIVVIAAAGNSGSSGNRNTMDYPARYSSVIAVGAVSSNNTRASFSSVGSELEVMAPGVNILSTTPGNNYASRNGTSMAAPHVAGAAALIKAKYPSMTNVQIRERLKNTATNLGDPFFYGKGVINVESALQ

SEQ ID NO: 70570 - protein, 275 aa, Bacillus amyloliquefaciens
AQSVPYGVSQIKAPALHSQGYTGSNVKVAVIDSGIDSSHPDLKVAGGVSMVPSETNPFQDNNSHGTHVAGTVAALNNSIGVLGVAPSASLYAVKVLLGSGSGQYSWIINGIEWAIANNMDVINMSLGGPSGSAALKAAVDKAVASGVVVVAAAGNEGTSGSSSTVGYPGKYPSVIAVGAVDSSNQRASFSSVGPELDVMAPGVSIQSTLPGNKYGALNGTSMASPHVAGAAALILSKHPNWTNTQVRSSLENTTTKLGDSFYYGKGLINVQAAAQ

SEQ ID NO: 70571 - protein, 275 aa, Bacillus amyloliquefaciens
AQSVPYGVSQIKAPALHSQGYTGSNVKVAVIDSGIDSSHPDLKVAGGASMVPSETNPFQDNNSHGTHVAGTVAALNNSIGVLGVAPSASLYAVKVLRGDGSGQYSWIINGIEWAIANNMDVINMSLGGPSGSAALKAAVDKAVASGVVVVAAAGNEGTSGSSSTVGYPGKYPSVIAVGAVDSSNQRASFSSVGPELDVMAPGVSIQSTLPGNKYGALNGTSMASPHVAGAAALILSKHPNWTNTQVRSSLENTTTKLGDSFYYGKGLINVQAAAQ

SEQ ID NO: 70572 - protein, 275 aa, Bacillus sp.
AQTVPWGIPHIKADKAHAAGVTGSGVKVAILDTGIDANHADLNVKGGASFVTGEPNALQDGNGHGTHVAGTVAALDNTTGVLGVAYNADLYAVKVLSASGSGTLSGIAQGIEWSISNRMNVINMSLGMVFGSTALQQACNNAYNRGIVVIAAAGNSGSSGNRNTMHYPARYSSVIAVGAVSSNNTRASFSSVGSELEVMAPGVNILSTTPGNNYASFNGTSMAAPHVAGAAALIKAKFPSMTNVQIRERLKNTATNLGDPFFYGKGVINVESALQ

SEQ ID NO: 70573 - protein, 275 aa, Bacillus amyloliquefaciens
AQSVPYGVSQIKAPALHSQGYTGSNVKVAVIDTGIDSSHPDLKVAGGASMVPSETNPFQDNNSHGTHVAGTVAALNNSIGVLGVAPSASLYAVKVLGADGSGQYSWIINGIEWAIANNMDVINMSLGGPSGSAALKAAVDKAVASGVVVVAAAGNEGTSGSSSTVGYPGKYPSVIAVGAVDSSNQRASFSSVGPELDVMAPGVSIQSTLPGNKYGAYNGTSMASPHVAGAAALILSKHPNWTNTQVRSSLENTTTKLGDSFYYGKGLINVQAAAQ

SEQ ID NO: 70574 - protein, 275 aa, Bacillus amyloliquefaciens
AQSVPYGVSQIKAPALHSQGYTGSNVKVAVIDSGIDSSHPDLKVAGGASMVPSETNPFQDNNSHGTHVAGTVAALNNSIGVLGVAPSASLYAVKVLHCGGSGQYSWIINGIEWAIANNMDVINMSLGGPSGSAALKAAVDKAVASGVVVVAAAGNEGTSGSSSTVGYPGKYPSVIAVGAVDSSNQRASFSSVGPELDVMAPGVSIQSTLPGNKYGALNGTSMASPHVAGAAALILSKHPNWTNTQVRSSLENTTTKLGDSFYYGKGLINVQAAAQ

SEQ ID NO: 70575 - protein, 275 aa, Bacillus amyloliquefaciens
AQSVPYGVSQIKATALHSQGYTGSNVKVAVIDSGIDSSHPDLKVAGGASMVPGESXAFQDNNSHGTHVAGTVAALNNSIGVLGVAPSASLYAVKVLGADGLGQYSWIINGIEWAIANNMDVINMSLGGPSGSAALKAAVDKAVASGVVVVAAAGNEGTSGSSSTVGYPGKYPSVIAVGAVDSSNQRASFSSVGPELDVMAPGVSIQSTLPGNKYGALNGTSMASPHVAGAAALILSKHPNWTNTQVRSSLENTTTKLGDSFYYGKGLINVQAAAQ

SEQ ID NO: 70576 - protein, 275 aa, unidentified
AQSVPYGVSQIKAPALHSQGYTGSNVKVAVIDSGIDSSHPDLKVAGGASMVPSETNPFQDNNSHGTHVAGTVAALNNSIGVLGVAPSASLYAVKVLGADGSGQYSWIINGIEWAIANNMDVINMSLGGPSGSAALKAAVDKAVASGVVVVAAAGNEGTSGSSSTVGYPGKYPSVIAVGAVDSSNQRASFSSVGPELDVMAPGVQIESTLPGNKYGELNGTSMASPHVAGAAALILSKHPNWTNTQVRSSLENTTTKLGDSFYYGKGLINVQAAAQ

SEQ ID NO: 70577 - protein, 275 aa, Bacillus sp.
AQTVPWGIPHIKADKAHAAGVTGSGVKVAILDTGIDANHADLNVKGGASFVSGEPNALQDGNGHGTHVAGTVAALDNTTGVLGVAYNADLYAVKVLSASGSGTLSGIAQGIEWSISNRMNVVNMSLGDFYGSTALQQACNNAYNRGIVVIAAAGNSGSSGNRNTMDYPARYSSVIAVGAVSSNNTRASFSSVGSELEVMAPGVNILSTTPGNNYASRNGTSMAAPHVAGAAALIKAKYPSMTNVQIRNRLKNTATNLGDPFFYGKGVINVESALQ

SEQ ID NO: 70578 - protein, 275 aa, Bacillus sp.
AQTVPWGIPHIKADKAHAAGVTGSGVSVAILDTGIDANHADLNVKGGASFVSEEPNALQDGNGHGTHVAGTVAALNNTTGVLGVAYNADLYAVKVLSASGSGTLSGIAQGIEWSISNGMNVINMSLGGSSGSTALQQACNNAYNRGIVVIAAAGNSGSDGNRNTMGYPARYSSVIAVGAVSSNNTRASFSSVGSELEVMAPGVNILSTTPGNNYASFNGTSMAAPHVAGAAALIKAKYPSMTNVQIRERLKNTATPLGDPFFYGKGVINVESALQ

SEQ ID NO: 70579 - protein, 275 aa, Bacillus amyloliquefaciens
AQSVPYGVSQIKAPALHSQGYTGSNVKVAVIDSGIDSSHPDLKVAGGASMVPSETNPFQDNNSHGTHVAGTVAALNNSIGVLGVAPSASLYAVKVLGASGSGQYSWIINGIEWAIANNMDVINMSLGGPSGSAALKAAVDKAVASGVVVVAAAGNEGTSGSSSTVGYPGKYPSVIAVGAVDSSNQRASFSSVGPELDVMAPGVSIQSTLPGNKYGAYNGTSMASPHVAGAAALILSKHPNWTNTQVRSSLENTTTKLGDSFYYGKGLINVQAAAQ

SEQ ID NO: 70580 - protein, 275 aa, Bacillus amyloliquefaciens
AQSVPYGVSQIKAPALHSQGYTGSNVKVAVIDSGIDSSHPDLKVAGGASMVPSETNPFQDNNSHGTHVAGTVAALNNSIGVLGVAPSASLYAVKVLGHSNSGQYSWIINGIEWAIANNMDVINMSLGGPSGSAALKAAVDKAVASGVVVVAAAGNEGTSGSSSTVGYPGKYPSVIAVGAVDSSNQRASFSSVGPELDVMAPGVSIQSTLPGNKYGALNGTSMASPHVAGAAALILSKHPNWTNTQVRSSLENTTTKLGDSFYYGKGLINVQAAAQ

SEQ ID NO: 70581 - protein, 275 aa, Bacillus amyloliquefaciens
AQSVPYGVSQIKAPALHSQGYTGSNVKVAVIDSGIDSSHPDLKVAGGASMVPSETNPFQDNNSHGTHVAGTVAALNNSIGVLGVAPSASLYAVKVLGADGSGVYSWIINGIEWAIANNMDVINMSLGGPSGSAALKAAVDKAVASGVVVVAAAGNEGTSGSSSTVGYPGKYPSVIAVGAVDSSNQRASFSSVGPELDVMAPGVSIQSTLPGNKYGALNGTSMASPHVAGAAALILSKHPNWTNTQVRSSLENTTTKLGDSFYYGKGLINVQAAAQ

SEQ ID NO: 70582 - protein, 275 aa, Bacillus amyloliquefaciens
AQSVPYGVSQIKAPALHSQGYTGSNVKVAVIDSGIDSSHPDLKVAGGASMVPSETNPFQDNNSHGTHVAGTVAALNNSIGVLGVAPSASLYAVKVLGCDGSGQYSWIINGIEWAIANNMDVINMSLGGPSGSAALKAAVDKAVASGVVVVAAAGNEGTSGSSSTVGYPGKYPSVIAVGAVDSSNQRASFSSVGPELDVMAPGVSIQSTLPGNKYGALNGTSMASPHVAGAAALILSKHPNWTNTQVRSSLENTTTKLGDSFYYGKGLINVQAAAQ

SEQ ID NO: 70583 - protein, 275 aa, Bacillus amyloliquefaciens
AQSVPYGVSQIKAPALHSQGYTGSNVKVAVIDSGIDSSHPDLKVAGGASMVPSETNPFQDNNSHGTHVAGTVAALNNSIGVLGVAPSASLYAVKVLGADGSGQYSWIINGIEWAIANNMDVINMSLGGPSGSAALKAAVDKAVASGVVVVAAAGNEGTSGSSSTVGYPGKYPSVIAVGAVDSSNQRASFSSVGPELDVMAPGVSIQSTLPGNIYGALNGTSMASPHVAGAAALILSKHPNWTNTQVRSSLENTTTKLGDSFYYGKGLINVQAAAQ

SEQ ID NO: 70584 - protein, 275 aa, Bacillus amyloliquefaciens
AQSVPYGVSQIKAPALHSQGYTGSNVKVAVIDSGIDSSHPDLKVAGGASMVPSETNPFQDNNSHGTHVAGTVAALNNSIGVLGVAPSASLYAVKVLHRLGSGQYSWIINGIEWAIANNMDVINMSLGGPSGSAALKAAVDKAVASGVVVVAAAGNEGTSGSSSTVGYPGKYPSVIAVGAVDSSNQRASFSSVGPELDVMAPGVSIQSTLPGNKYGALNGTSMASPHVAGAAALILSKHPNWTNTQVRSSLENTTTKLGDSFYYGKGLINVQAAAQ

SEQ ID NO: 70585 - protein, 275 aa, Bacillus amyloliquefaciens
AQSVPYGVSQIKAPALHSQGYTGSNVKVAVIDSGIDSSHPDLKVAGGASMVPSETNPFQDNNSHGTHVAGTVAALNNSIGVLGVAPSASLYAVKVLGADGSGQYSWIIGGIEWAITNNMDVINMSLGGPSGSAALKAAVDKAVASGVVVVAAAGNEGTSGSSSTVGYPGKYPSVIAVGAVDSSNQRASFSSVGPELDVMAPGVSIQSTLPGNKYGAYNGTSMASPHVAGAAALILSKHPNWTNTQVRSSLENTTTKLGDSFYYGKGLINVQAAAQ

SEQ ID NO: 70586 - protein, 274 aa, Bacillus amyloliquefaciens
AQSVPYGVSQIKATALHSQGYTGSNVKVAVIDSGIDSSHPDLKVAGGASMVPGESAFQDNNSHGTHVAGTVAALNNSIGVLGVAPSASLYAVKVLGADGLGQYSWIINGIEWAIANNMDVINMSLGGPSGSAALKAAVDKAVASGVVVVAAAGNEGTSGSSSTVGYPGKYPSVIAVGAVDSSNQRASFSSVGPELDVMAPGVSIQSTLPGNKYGALNGTSMASPHVAGAAALILSKHPNWTNTQVRSSLENTTTKLGDSFYYGKGLINVQAAAQ

SEQ ID NO: 70587 - protein, 275 aa, Bacillus amyloliquefaciens
AQSVPYGVSQIKAPALHSQGYTGSNVKVAVIDSGIDSSHPDLKVAGGASMVPSETNPFQDNNSHGTHVAGTVAALNNSFGVLGVAPSASLYAVKVLGGDGSGQYSWIINGIEWAIANNMDVINMSLGGPSGSAALKAAVDKAVASGVVVVAAAGNEGTSGSSSTVGYPGKYPSVIAVGAVDSSNQRASFSSVGPELDVMAPGVSIQSTLPGNKYGALNGTSMASPHVAGAAALILSKHPNWTNTQVRSSLENTTTKLGDSFYYGKGLINVQAAAQ

SEQ ID NO: 70588 - protein, 275 aa, Bacillus amyloliquefaciens
AQSVPYGVSQIKAPALHSQGYTGSNVKVAVIDSGIDSSHPDLKVAGGASMVPSETNPFQDNNSHGTHVAGTVAALNNSIGVLGVAPSASLYAVKVLSRCGSGQYSWIINGIEWAIANNMDVINMSLGGPSGSAALKAAVDKAVASGVVVVAAAGNEGTSGSSSTVGYPGKYPSVIAVGAVDSSNQRASFSSVGPELDVMAPGVSIQSTLPGNKYGALNGTSMASPHVAGAAALILSKHPNWTNTQVRSSLENTTTKLGDSFYYGKGLINVQAAAQ

SEQ ID NO: 70589 - protein, 275 aa, Bacillus amyloliquefaciens
AQSVPYGVSQIKAPALHSQGYTGSNVKVAVIDSGIDSSHPDLKVAGGASMVPSETNPFQDNNSHGTHVAGTVAALNNSIGVLGVAPSASLYAVKVLRNGGSGQYSWIINGIEWAIANNMDVINMSLGGPSGSAALKAAVDKAVASGVVVVAAAGNEGTSGSSSTVGYPGKYPSVIAVGAVDSSNQRASFSSVGPELDVMAPGVSIQSTLPGNKYGALNGTSMASPHVAGAAALILSKHPNWTNTQVRSSLENTTTKLGDSFYYGKGLINVQAAAQ

SEQ ID NO: 70590 - protein, 275 aa, Bacillus amyloliquefaciens
AQSVPYGVSRIKAPALHSQGYTGSNVKVAVIDSGIDSSHPDLKVAGGASMVPSETNPFQDNNSHGTHVAGTVAALNNSIGVLGVAPSASLYAVKVLGADGSGQYSWIINGIEWAIANNMDVINMSLGGPSGSAALKAAVDKAVASGVVVVAAAGNEGTSGSSSTVGYPGKYPSVIAVGAVDSSNQRASFSSVGPELDVMAPGVSIQSTLPGNKYGALNGTSMASPHVAGAAALILSKHPNWTNTQVRSSLENTTTKLGDSFYYGKGLINVQAAAQ

SEQ ID NO: 70591 - protein, 275 aa, Bacillus amyloliquefaciens
AQSVPYGVSQIKAPALHSQGYTGGNVKVAVIDTGIDSSHPDLKVAGGASMVPGETNPFQDGNGHGTHVAGTVAALNNNIGVLGVAPSASLYAVKVLGADGNGQYSWIIGGIEWAIANNMDVINMSLGSPSGSAALKAAVDKAVASGVVVVAAAGNEGTSGSSSTVGYPGKYPSVIAVGAVDSSNQRASFSSVGPELDVMAPGVSIQSTLPGNKYGAQSGTSMASPHVAGAAALILSKHPNWTVTQVRSSLENTTTKLGDSFYYGKGLINVQAAAQ

SEQ ID NO: 70592 - protein, 275 aa, Bacillus sp.
AQTVPWGIPHIKADKAHAAGVTGSGVKVAILDTGIDANHADLNVKGGASFVSDEPNALQDGNGHGTHVAGTVAALDNTTGVLGVAYNADLYAVKVLSASGSGTLSGIAQGIEWSISNRMNVINMSLGDFYGSTALQQACNNAYNRGIVVIAAAGNSGSSGNRNTMDYPARYSSVIAVGAVSSNNTRASFSSVGSELEVMAPGVNILSTTPGNNYASFNGTSMAAPHVAGAAALIKAKYPSMTNVQIRNRLKNTATNLGDPFFYGKGVINVEKALQ

SEQ ID NO: 70593 - protein, 275 aa, Bacillus amyloliquefaciens
AQSVPYGVSQIKAPALHSQGYTGSNVKVAVIDSGIDSSHPDLKVAGGASMVPSETNPFQDNNSHGTHVAGTVAALNNSIGVLGVAPSASLYAVKVLSRLGSGQYSWIINGIEWAIANNMDVINMSLGGPSGSAALKAAVDKAVASGVVVVAAAGNEGTSGSSSTVGYPGKYPSVIAVGAVDSSNQRASFSSVGPELDVMAPGVSIQSTLPGNKYGALNGTSMASPHVAGAAALILSKHPNWTNTQVRSSLENTTTKLGDSFYYGKGLINVQAAAQ

SEQ ID NO: 70594 - protein, 275 aa, Bacillus amyloliquefaciens
AQSVPYGVSQIKAPALHSQGYTGSNVKVAVIDSGIDSSHPDLKVAGGASMVPSETNPFQDNNSHGTHVAGTVAALNNSIGVLGVAPSASLYAVKVLGIGGSGQYSWIINGIEWAIANNMDVINMSLGGPSGSAALKAAVDKAVASGVVVVAAAGNEGTSGSSSTVGYPGKYPSVIAVGAVDSSNQRASFSSVGPELDVMAPGVSIQSTLPGNKYGALNGTSMASPHVAGAAALILSKHPNWTNTQVRSSLENTTTKLGDSFYYGKGLINVQAAAQ

SEQ ID NO: 70595 - protein, 275 aa, Bacillus amyloliquefaciens
AQSVPYGVSQIKAPALHSQGYTGSNVKVAVIDSGIDSSHPDLKVAGGASMVPSETNPFQDNNSHGTHVAGTVAALNNSIGVLGVAPSASLYAVKVLGCRGSGQYSWIINGIEWAIANNMDVINMSLGGPSGSAALKAAVDKAVASGVVVVAAAGNEGTSGSSSTVGYPGKYPSVIAVGAVDSSNQRASFSSVGPELDVMAPGVSIQSTLPGNKYGALNGTSMASPHVAGAAALILSKHPNWTNTQVRSSLENTTTKLGDSFYYGKGLINVQAAAQ

SEQ ID NO: 70596 - protein, 275 aa, Bacillus sp.
AQTVPWGIPHIKADKAHAAGVTGSGVKVAILDTGIDANHADLNVKGGASFVTGEPNALQDGNGHGTHVAGTVAALNNTTGVLGVAYNADLYAVKVLSASGSGTLSGIAQGIEWSISNGMNVINMSLGGSSGSTALQQACNNAYNRGIVGIAAAGNNGSSGNRNTMDYPARYSSVIAVGAVSSNNTRASFSSVGSELEVMAPGVNILSTTPGNNYASRNGTSMAAPHVAGAAALIKAKYPSMTNVQIRERLKNTATNLGDPFFYGKGVINVESALQ

SEQ ID NO: 70597 - protein, 275 aa, Bacillus amyloliquefaciens
AQSVPYGVSQIKAPALHSQGYTGSNVKVAVIDSGIDSSHPDLKVAGGASMVPSETNPFQDNNSHGTHVAGTVAALNNSIGVLGVAPSASLYAVKVLGCLGSGQYSWIINGIEWAIANNMDVINMSLGGPSGSAALKAAVDKAVASGVVVVAAAGNEGTSGSSSTVGYPGKYPSVIAVGAVDSSNQRASFSSVGPELDVMAPGVSIQSTLPGNKYGALNGTSMASPHVAGAAALILSKHPNWTNTQVRSSLENTTTKLGDSFYYGKGLINVQAAAQ

SEQ ID NO: 70598 - protein, 275 aa, Bacillus amyloliquefaciens
AQSVPYGVSQIKAPALHSQGYTGSNVKVAVIDSGIDSSHPDLKVAGGASMVPSETNPFQDNNSHGTHVAGTVAALNNSIGVLGVAPSASLYAVKVLGSGDSGQYSWIINGIEWAIANNMDVINMSLGGPSGSAALKAAVDKAVASGVVVVAAAGNEGTSGSSSTVGYPGKYPSVIAVGAVDSSNQRASFSSVGPELDVMAPGVSIQSTLPGNKYGALNGTSMASPHVAGAAALILSKHPNWTNTQVRSSLENTTTKLGDSFYYGKGLINVQAAAQ

SEQ ID NO: 70599 - protein, 274 aa, Bacillus amyloliquefaciens
AQSVPYGVSQIKATALHSQGYTGSNVKVAVIDSGIDSSHPDLKVAGGASMVPSESAFQDNNSHGTHVAGTVAALNNSIGVLGVAPSASLYAVKVLGADGSGQYSWIINGIEWAIANNMDVINMSLGGPSGSAALKAAVDKAVASGVVVVAAAGNEGTSGSSSTVGYPGKYPSVIAVGAVDSSNQRASFSSVGPELDVMAPGVSIQSTLPGNKYGALNGTSMASPHVAGAAALILSKHPNWTNTQVRSSLENTTTKLGDSFYYGKGLINVQAAAQ

SEQ ID NO: 70600 - protein, 275 aa, Bacillus sp.
AQTVPWGIPHIKADKAHAAGVTGSGVKVAILDTGIDANHADLNVKGGASFVAGEPNALQDGNGHGTHVAGTVAALDNSIGVLGVAPNVSLYAVKVLGASGSGSVSSIAQGLEWAGNNGMHVANLSLGSPSPSATLEQAVNSATSRGVLVVAAAGNSGTSGNRNTMDYPARYSSVIAVGAVSSNNTRASFSSVGSELEVMAPGVNILSTTPGNNYASLNGTSMATPHVAGAAALIKAKYPSMTNVQIRNRLKNTATNLGDPFFYGKGVINVESALQ

SEQ ID NO: 70601 - protein, 275 aa, Bacillus sp.
AQTVPWGIPHIKADKAHAAGVTGSGVKVAILDTGIDANHADLNVKGGASFVSGEPNALQDGNGHGTHVAGTVAALNNTTGVLGVAYNADLYAVKVLSASGSGTLSGIAQGIEWSISNRMNVINMSLGLMNGSTALQQACNNAYNRGIVVIAAAGNSGSSGNRNTMDYPARYSSVIAVGAVSSNNTRASFSSVGSELEVMAPGVNILSTTPGNNYASFNGTSMAAPHVAGAAALIKAKYPSMTNVQIRNRLKNTATNLGDPFFYGKGVINVESALQ

SEQ ID NO: 70602 - protein, 275 aa, Bacillus amyloliquefaciens
AQSVPYGVSQIKAPALHSQGYTGSNVKVAVIDSGIDSSHPDLKVAGGASMVPSETNPFQDNNSHGTHVAGTVAALNNSIGVLGVAPSASLYAVKVLGASGIGQYSWIINGIEWAIANNMDVINMSLGGPSGSAALKAAVDKAVASGVVVVAAAGNEGTSGSSSTVGYPGKYPSVIAVGAVDSSNQRASFSSVGPELDVMAPGVSIQSTLPGNKYGALNGTSMASPHVAGAAALILSKHPNWTNTQVRSSLENTTTKLGDSFYYGKGLINVQAAAQ

SEQ ID NO: 70603 - protein, 275 aa, Bacillus sp.
AQTVPWGIPHIKADKAHAAGVTGSGVKVAILDTGIDANHADLNVKGGASFVSGEPNALQDGNGHGTHVAGTVAALNNTTGVLGVAYNADLYAVKVLSASGSGTLSGIAQGIEWSISNGMNVINMSLGVMHGSTALQQACNNAYNRGIVVIAAAGNSGSSGNRNTMDYPARYSSVIAVGAVSSNNTRASFSSVGSELEVMAPGVNILSTTPGNNYASRNGTSMAAPHVAGAAALIKAKYPSMTNVQIRDRLKNTATNLGDPFFYGKGVINVEKALQ

SEQ ID NO: 70604 - protein, 275 aa, Bacillus amyloliquefaciens
AQSVPYGVSQIKAPALHSQGYTGSNVKVAVIDSGIDSSHPDLKVAGGASMVPSETNPFQDNNSHGTHVAGTVAALNNSIGVLGVAPSASLYAVKVLSRGGSGQYSWIINGIEWAIANNMDVINMSLGGPSGSAALKAAVDKAVASGVVVVAAAGNEGTSGSSSTVGYPGKYPSVIAVGAVDSSNQRASFSSVGPELDVMAPGVSIQSTLPGNKYGALNGTSMASPHVAGAAALILSKHPNWTNTQVRSSLENTTTKLGDSFYYGKGLINVQAAAQ

SEQ ID NO: 70605 - protein, 275 aa, Bacillus amyloliquefaciens
AQSVPYGVSQIKAPALHSQGYTGSNVKVAVIDSGIDSSHPDLKVAGGASMVPSETNPFQDNNSHGTHVAGTVAALNNSIGVLGVAPSASLYAVKVLGRNGSGQYSWIINGIEWAIANNMDVINMSLGGPSGSAALKAAVDKAVASGVVVVAAAGNEGTSGSSSTVGYPGKYPSVIAVGAVDSSNQRASFSSVGPELDVMAPGVSIQSTLPGNKYGALNGTSMASPHVAGAAALILSKHPNWTNTQVRSSLENTTTKLGDSFYYGKGLINVQAAAQ

SEQ ID NO: 70606 - protein, 275 aa, Bacillus amyloliquefaciens
AQSVPYGVSQIKAPALHSQGYTGSNVKVAVIDSGIDSSHPDLKVAGGASMVPSETNPFQDNNSHGTHVAGTVAALNNSIGVLGVAPSASLYAVKVLGADGSGQYSWIINGIEWAIANNMDVINMSLGGLSGSAALKAAVDKAVASGVVVVAAAGNEGTSGSSSTVGYPGKYPSVIAVGAVDSSNQRASFSSVGPELDVMAPGVSIQSTLPGNKYGALNGTSMASPHVAGAAALILSKHPNWTNTQVRSSLENTTTKLGDSFYYGKGLINVQAAAQ

SEQ ID NO: 70607 - protein, 275 aa, Bacillus amyloliquefaciens
AQSVPYGVSQIKAPALHSQGYTGSNVKVAVIDSGIDSSHPDLKVAGGASMVPSETNPFQDNNSHGTHVAGTVAALNNSIGVLGVAPSASLYAVKVLGADGSGQYSWIINGIEWAIANNMDVINMSLGGPSGSAALKAAVDKAVASGVVVVAAAGNEGTSGSSSTVGYPGKYPSVIAVGAVDSSNQRASFSSVGPELDVMAPGVSIESTLPGNKYGALNGTSMASPHVAGAAALILSKHPNWTNTQVRSSLENTTTKLGDSFYYGKGLINVQAAAQ

SEQ ID NO: 70608 - protein, 275 aa, Bacillus amyloliquefaciens
AQSVPYGVSQIKAPALHSQGYTGSNVKVAVIDSGIDSSHPDLKVAGGASMVPSETNPFQDNNSHGTHVAGTVAALNNSIGVLGVAPSASLYAVKVLSCHGSGQYSWIINGIEWAIANNMDVINMSLGGPSGSAALKAAVDKAVASGVVVVAAAGNEGTSGSSSTVGYPGKYPSVIAVGAVDSSNQRASFSSVGPELDVMAPGVSIQSTLPGNKYGALNGTSMASPHVAGAAALILSKHPNWTNTQVRSSLENTTTKLGDSFYYGKGLINVQAAAQ

SEQ ID NO: 70609 - protein, 275 aa, Bacillus amyloliquefaciens
AQSVPYGVSQIKAPALHSQGYTGSNVKVAVIDSGIDSSHPDLKVAGGASMVPSETNPFQDNNSHGTHVAGTVAALDNNIGVLGVAPSASLYAVKVLGADGSGQYSWIINGIEWAIANNMDVINMSLGGPSGSAALKAAVDKAVASGVVVVAAAGNEGTSGSSSTVGYPGKYPSVIAVGAVDSSNQRASFSSVGPELDVMAPGVSIQSTLPGNKYGAYNGTSMASPHVAGAAALILSKHPNWTNTQVRSSLENTTTKLGPSFYYGKGLINVQAAAQ

SEQ ID NO: 70610 - protein, 275 aa, Bacillus sp.
AQTVPWGIPHIKADKAHAAGVTGSGVKVAILDTGIDANHADLNVKGGASFVSGEPNALQDGNGHGTHVAGTVAALDNTTGVLGVAYNADLYAVKVLSASGSGTLSGIAQGIEWSISNRMNVINMSLGDSNGSTALQQACNNAYNRGIVVIAAAGNSGSSDNRNTMDYPARYSSVIAVGAVSSNNTRASFSSVGSELEVMAPGVNILSTTPGNNYASFNGTSMAAPHVAGAAALIKAKYPSMTNVQIRNRLKNTATNLGDPFFYGKGVINVESALQ

SEQ ID NO: 70611 - protein, 275 aa, Synthetic construct
AQSVPYGVSQIKAPALHSQGYTGSNVKVAVIDSGIDSSHPDLKVAGGASMVPSETNPFQDNNSHGTHVAGTVAALNNSIGVLGVAPSASLYAVKVLGADGSGQYSWIINGIEWAIANNMDVINMSLGGPSGSAALKAAVDKAVASGVVVVAAAGNEGTSGSSSTVGYPGKYPSVIAVGAVDSSNQRASFSSVGPELDVMAPGVSIESTLPGNEYGALNGTSMASPHVAGAAALILSKHPNWTNTQVRSSLENTTTKLGDSFYYGKGLINVQAAAQ

SEQ ID NO: 70612 - protein, 275 aa, Bacillus amyloliquefaciens
AQSVPYGVSQIKAPALHSQGYTGSNVKVAVIDSGIDSSHPDLKVAGGASMVPSETNPFQDNNSHGTHVAGTVAALNNSIGVLGVAPSASLYAVKVLGHCGSGQYSWIINGIEWAIANNMDVINMSLGGPSGSAALKAAVDKAVASGVVVVAAAGNEGTSGSSSTVGYPGKYPSVIAVGAVDSSNQRASFSSVGPELDVMAPGVSIQSTLPGNKYGALNGTSMASPHVAGAAALILSKHPNWTNTQVRSSLENTTTKLGDSFYYGKGLINVQAAAQ

SEQ ID NO: 70613 - protein, 275 aa, Bacillus amyloliquefaciens
AQSVPYGVSQIKAPALHSQGYTGSNVKVAVIDSGIDSSHPDLKVAGGASMVPSETNPFQDNNSHGTHVAGTVAALNNSIGVLGVAPSASLYAVKVLDGRGSGQYSWIINGIEWAIANNMDVINMSLGGPSGSAALKAAVDKAVASGVVVVAAAGNEGTSGSSSTVGYPGKYPSVIAVGAVDSSNQRASFSSVGPELDVMAPGVSIQSTLPGNKYGALNGTSMASPHVAGAAALILSKHPNWTNTQVRSSLENTTTKLGDSFYYGKGLINVQAAAQ

SEQ ID NO: 70614 - protein, 275 aa, Bacillus amyloliquefaciens
AQSVPYGVSQIKAPALHSQGYTGSNVKVAVIDSGIDSSHPDLKVAGGASMVPSETNPFQDNNSHGTHVAGTVAALNNSIGVLGVAPSASLYAVKVLGGGGSGQYSWIINGIEWAIANNMDVINMSLGGPSGSAALKAAVDKAVASGVVVVAAAGNEGTSGSSSTVGYPGKYPSVIAVGAVDSSNQRASFSSVGPELDVMAPGVSIQSTLPGNKYGALNGTSMASPHVAGAAALILSKHPNWTNTQVRSSLENTTTKLGDSFYYGKGLINVQAAAQ

SEQ ID NO: 70615 - protein, 275 aa, Bacillus amyloliquefaciens
AQSVPYGVSQIKAPALHSQGYTGSNVKVAVIDSGIDSSHPDLKVAGGASMVPSETNPFQDNNSHGTHVAGTVAALNNSIGVLGVAPSASLYAVKVLSGGGSGQYSWIINGIEWAIANNMDVINMSLGGPSGSAALKAAVDKAVASGVVVVAAAGNEGTSGSSSTVGYPGKYPSVIAVGAVDSSNQRASFSSVGPELDVMAPGVSIQSTLPGNKYGALNGTSMASPHVAGAAALILSKHPNWTNTQVRSSLENTTTKLGDSFYYGKGLINVQAAAQ

SEQ ID NO: 70616 - protein, 275 aa, Bacillus sp.
AQTVPWGIPHIKADKAHAAGVTGSGVKVAILDTGIDANHADLNVKGGASFVSGEPNALQDGNGHGTHVAGTVAALDNTTGVLGVAYNADLYAVKVLSASGSGTLSGIAQGIEWSISNRMNVINMSLGDFYGSTALQQACNNAYNRGIVVIAAAGNNGSSGNRNTMDYPARYSSVIAVGAVSSNNTRASFSSVGSELEVMAPGVNILSTTPGNNYASRNGTSMAAPHVAGAAALIKAKYPSMTNVQIRNRLKNTATNLGDPFFYGKGVINVEKALQ

SEQ ID NO: 70617 - protein, 275 aa, Bacillus amyloliquefaciens
AQSVPYGVSQIKAPALHSQGYTGSNVKVAVIDSGIDSSHPDLKVAGGASMVPSETNPFQDNNSHGTHVAGTVAALDNNIGVLGVAPSASLYAVKVLGADGSGQYSWIINGIEWAIANNMDVINMSLGGPSGSAALKAAVDKAVASGVVVVAAAGNEGTSGSSSTVGYPGKYPSVIAVGAVDSSNQRASFSSVGPELDVMAPGVSIQSTLPPNKYGAYNGTSMASPHVAGAAALILSKHPNWTNTQVRSSLENTTTKLGDSFYYGKGLINVQAAAQ

SEQ ID NO: 70618 - protein, 275 aa, Bacillus sp.
AQTVPWGIPHIKADKAHAAGVTGSGVKVAILDTGIDANHADLNVKGGASFVTGEPNALQDGNGHGTHVAGTVAALDNTTGVLGVAYNADLYAVKVLSASGSGTLSGIAQGIEWSISNRMNVINMSLGVMHGSTALQQACNNAYNRGIVVIAAAGNSGSSGNRNTMDYPARYSSVIAVGAVSSNNTRASFSSVGSELEVMAPGVNILSTTPGNNYASRNGTSMAAPHVAGAAALIKAKYPSMTNVQIRERLKNTATELGDPFFYGKGVINVEKALQ

SEQ ID NO: 70619 - protein, 275 aa, Bacillus amyloliquefaciens
AQSVPYGVSQIKAPALHSQGYTGSNVKVAVIDSGIDSSHPDLKVAGGASMVPSETNPFQDNNGHGTHVAGTVAALNNSIGVLGVAPSASLYAVKVLGADGSGQYSWIINGIEWAIANNMDVINMSLGGPSGSAALKAAVDKAVASGVVVVAAAGNEGTSGSSSTVGYPGKYPSVIAVGAVDSSNQRASFSSVGPELDVMAPGVSIQSTLPGNKYGAYNGTSMASPHVAGAAALILSKHPNWTNTQVRSSLENTTTKLGDSFYYGKGLINVQAAAQ

SEQ ID NO: 70620 - protein, 275 aa, Bacillus sp.
AQTVPWGIPHIKADKAHAAGVTGSGVKVAILDTGIDANHADLNVKGGASFVSGEPNALQDGNGHGTHVAGTVAALNNTTGVLGVAYNADLYAVKVLSASGSGTLSGIAQGIEWSISNGMNVINMSLGGSSGSTALQQACNNAYNRGIVLIAAAGNHGSDGNRNTMGYPARYSSVIAVGAVSSNNQRASFSSVGSELEVMAPGVNILSTTPGNNYASFNGTSMAAPHVAGAAALIKAKYPSMTNVQIRERLKNTATNLGDPFFYGKGVINVEQALQ

SEQ ID NO: 70621 - protein, 275 aa, Bacillus amyloliquefaciens
AQSVPYGVSQIKAPALHSQGYTGSNVKVAVIDSGIDSSHPDLKVAGGASMVPSETNPFQDNNSHGTHVAGTVAALNNSIGVLGVAPSASLYAVKVLGGVGSGQYSWIINGIEWAIANNMDVINMSLGGPSGSAALKAAVDKAVASGVVVVAAAGNEGTSGSSSTVGYPGKYPSVIAVGAVDSSNQRASFSSVGPELDVMAPGVSIQSTLPGNKYGALNGTSMASPHVAGAAALILSKHPNWTNTQVRSSLENTTTKLGDSFYYGKGLINVQAAAQ

SEQ ID NO: 70622 - protein, 275 aa, Bacillus amyloliquefaciens
AQSVPYGVSQIKAPALHSQGYTGSNVKVAVIDSGIDSSHPDLKVAGGASMVPSETNPFQDNNSHGTHVAGTVAALNNSIGVLGVAPSASLYAVKVLGGGGSGQYSWIINGIEWAIANNMDVINMSLGGPSGSAALKAAVDKAVASGVVVVAAAGNEGTSGSSSTVGYPGKYPSVIAVGAVDSSNQRASFSSVGPELDVMAPGVSIQSTLPGNKYGALNGTSMASPHVAGAAALILSKHPNWTDTQVRSSLENTTTKLGDSFYYGKGLINVQAAAQ

SEQ ID NO: 70623 - protein, 275 aa, Bacillus amyloliquefaciens
AQSVPYGVSQIKAPALHSQGYTGSNVKVAVIDSGIDSSHPDLKVAGGASMVPSETNPFQDNNSHGTHVAGTVAALDNSIGVLGVAPSASLYAVKVLGADGSGQYSWIINGIEWAIANNMDVINMSLGGPSGSAALKAAVDKAVARGVVVVAAAGNEGTSGSSSTVGYPGKYPSVIAVGAVDSSNQRASFSSVGPELDVMAPGVSIQSTLPGNKYGAYSGTSMASPHVAGAAALILSKHPNWTNTQVRSSLENTTTKLGDSFYYGKGLINVQAAAQ

SEQ ID NO: 70624 - protein, 275 aa, Bacillus sp.
AQTVPWGIPHIKADKAHAAGVTGSGVKVAILDTGIDANHADLNVKGGASFVSGEPNALQDGNGHGTHVAGTVAALNNTTGVLGVAYNADLYAVKVLSASGSGTLSGIAQGIEWSISNGMNVINMSLGGSSGSTALQQACNNAYNRGIVVIAAAGNSGSDGNRNTMDYPARYSSVIAVGAVSENNTRASFSSVGSELEVMAPGVNILSTTPGNNYASRNGTSMAAPHVAGAAALIKAKYPSMTNVQIRERLKNTATNLGDPFFYGKGVINVESALQ

SEQ ID NO: 70625 - protein, 275 aa, Bacillus amyloliquefaciens
AQSVPYGVSQIKAPALHSQGYTGSNVKVAVIDSGIDSSHPDLKVAGGASMVPSETNPFQDNNSHGTHVAGTVAALNNSIGVLGVAPSASLYAVKVLGADGSGQYSWIIDGIEWAIANNMDVINMSLGGPSGSAALKAAVDKAVASGVVVVAAAGNEGTSGSSSTVGYPGKYPSVIAVGAVDSSNQRASFSSVGPELDVMAPGVSIQSTLPGNKYGALNGTSMASPHVAGAAALILSKHPNWTNTQVRSSLENTTTKLGDSFYYGKGLINVQAAAQ

SEQ ID NO: 70626 - protein, 275 aa, Bacillus amyloliquefaciens
AQSVPYGVSQIKAPALHSQGYTGSNVKVAVIDSGIDSSHPDLKVAGGASMVPGETNPGQDNNSHGTHVAGTVAALNNSIGVLGVAPSASLYAVKVLGADGSGQYSWIINGIEWAIANNMDVINMSLGGPSGSAALKAAVDKAVASGVVVVAAAGNEGTSGSSSTVGYPGKYPSVIAVGAVDSSNQRASFSSVGPELDVMAPGVSIQSTLPGNKYGAYNGTSMASPHVAGAAALILSKHPNWTNTQVRSSLENTTTKLGDSFYYGKGLINVQAAAQ

SEQ ID NO: 70627 - protein, 275 aa, Bacillus sp.
AQTVPWGIPHIKADKAHAAGVTGSGVKVAILDTGIDATHADLNVKGGASFVSGEPNALQDGNGHGTHVAGTVAALNNTTGVLGVAYNADLYAVKVLSASGSGTLSGIAQGIEWSISNGMNVINMSLGGSSGSTALQQACNNAYNRGIVVIAAAGNHGSDGNRNTMYYPARYSSVIAVGAVSSNNQRASFSSVGSELEVMAPGVNILSTTPGNNYASFNGTSMAAPHVAGAAALIKAKYPSMTNVQIRERLKNTATNLGDPFFYGKGVINVEQALQ

SEQ ID NO: 70628 - protein, 275 aa, Bacillus amyloliquefaciens
AQSVPYGVSQIKAPALHSQGYTGSNVKVAVIDSGIDSSHPDLKVAGGASMVPSETNPFQDNNSHGTHVAGTVAALNNSIGVLGVAPSASLYAVKVLGCHGSGQYSWIINGIEWAIANNMDVINMSLGGPSGSAALKAAVDKAVASGVVVVAAAGNEGTSGSSSTVGYPGKYPSVIAVGAVDSSNQRASFSSVGPELDVMAPGVSIQSTLPGNKYGALNGTSMASPHVAGAAALILSKHPNWTNTQVRSSLENTTTKLGDSFYYGKGLINVQAAAQ

SEQ ID NO: 70629 - protein, 275 aa, Bacillus amyloliquefaciens
AQSVPYGVSQIKAPALHSQGYTGSNVKVAVIDSGIDSSHPDLKVAGGASMVPSETNPFQDNNSHGTHVAGTVAALNNSIGVLGVAPSASLYAVKVLLRNGSGQYSWIINGIEWAIANNMDVINMSLGGPSGSAALKAAVDKAVASGVVVVAAAGNEGTSGSSSTVGYPGKYPSVIAVGAVDSSNQRASFSSVGPELDVMAPGVSIQSTLPGNKYGALNGTSMASPHVAGAAALILSKHPNWTNTQVRSSLENTTTKLGDSFYYGKGLINVQAAAQ

SEQ ID NO: 70630 - protein, 275 aa, unidentified
AQSVPYGVSQIKAPALHSQGYTGSNVKVAVIDSGIDSSHPDLKVAGGASMVPSETNPFQDNNSHGTHVAGTVAALNNSIGVLGVAPSASLYAVKVLGADGSGQYSWIINGIEWAIANNMDVINMSLGGPSGSAALKAAVDKAVASGVVVVAAAGNEGTSGSSSTVGYPGKYPSVIAVGAVDSSNQRASFSSVGPELDVMAPGVSIQSTLPGNKYGELNGTSMASPHVAGAAALILSKHPNWTNTQVRSSLENTTTKLGDSFYYGKGLINVQAAAQ

SEQ ID NO: 70631 - protein, 275 aa, Bacillus amyloliquefaciens
AQSVPYGVSQIKAPALHSQGYTGSNVKVAVIDSGIDSSHPDLKVAGGASMVPSETNPFQDNNSHGTHVAGTVAALNNSIGVLGVAPSASLYAVKVLCGGGSGQYSWIINGIEWAIANNMDVINMSLGGPSGSAALKAAVDKAVASGVVVVAAAGNEGTSGSSSTVGYPGKYPSVIAVGAVDSSNQRASFSSVGPELDVMAPGVSIQSTLPGNKYGALNGTSMASPHVAGAAALILSKHPNWTNTQVRSSLENTTTKLGDSFYYGKGLINVQAAAQ

SEQ ID NO: 70632 - protein, 275 aa, Bacillus amyloliquefaciens
AQSVPYGVSQIKAPALHSQGYTGSNVKVAVIDSGIDSSHPDLKVAGGASMVPSETYPFQDNNSHGTHVAGTVAALNNSIGVLGVAPSASLYAVKVLGADGSGQYSWIINGIEWAIANNMDVINMSLGGPSGSAALKAAVDKAVASGVVVVAAAGNEGTSGSSSTVGYPGKYPSVIAVGAVDSSNQRASFSSVGPELDVMAPGVSIQSTLPGNKYGAYNGTSMASPHVAGAAALILSKHPNWTNTQVRSSLENTTTKLGDSFYYGKGLINVQAAAQ

SEQ ID NO: 70633 - protein, 275 aa, Bacillus amyloliquefaciens
AQSVPYGVSQIKAPALHSQGYTGSNVKVAVIDSGIDSSHPDLKVAGGASMVPSETNPFQDNNSHGTHVAGTVAALDNSIGVLGVAPSASLYAVKVLGADGSGQYSWIINGIEWAIANNMDVINMSLGGPSGSAALKAAVDKAVASGVVVVAAAGNEGTSGSSSTVGYPGKYPSVIAVGAVDSSNQRASFSSVGPELDVMAPGVSIQSTLPGNKYGAYNGTSMASPHVAGAAALILSKHPNWTNTQVRSSLENTTTKLGDSFYYGKGLINVQAAAQ

SEQ ID NO: 70634 - protein, 275 aa, Bacillus amyloliquefaciens
AQSVPYGVSQIKAPALHSQGYTGSNVKVAVIDSGIDSSHPDLKVAGGASMVPSETNPFQDNNSHGTHVAGTVAALNNSIGVLGVAPSASLYAVKVLGSDGSGQYSWIINGIEWAIANNMDVINMSLGGPSGSAALKAAVDKAVASGVVVVAAAGNEGTSGSSSTVGYPGKYPSVIAVGAVDSSNQRASFSSVGPELDVMAPGVSIQSTLPGNKYGAYNGTSMASPHVAGAAALILSKHPNWTNTQVRSSLENTTTKLGDSFYYGKGLINVQAAAQ

SEQ ID NO: 70635 - protein, 275 aa, Bacillus sp.
AQTVPWGIPHIKADKAHAAGVTGSGVKVAILDTGIDANHADLNVKGGASFVTGEPNALQDGNGHGTHVAGTVAALDNTTGVLGVAYNADLYAVKVLSASGSGTLSGIAQGIEWSISNRMNVINMSLGDFYGSTALQQACNNAYNRGIVVIAAAGNNGSSGNRNTMHYPARYSSVIAVGAVSSNNTRASFSSVGSELEVMAPGVNILSTTPGNNYASRNGTSMAAPHVAGAAALIKAKYPSMTNVQIRNRLKNTATRLGDPFFYGKGVINVESALQ

SEQ ID NO: 70636 - protein, 275 aa, Bacillus amyloliquefaciens
AQSVPYGVSQIKAPALHSQGYVGSNVKVAVIDSGIDSSHPDLKVAGGASMVPSETNPFQDNNSHGTHVAGTVAALNNSIGVLGVAPSASLYAVKVLGADGSGQYSWIINGIEWAIANNMDVINMSLGGPSGSAALKAAVDKAVASGVVVVAAAGNEGTSGSSSTVGYPGKYPSVIAVGAVDSSNQRASFSSVGPELDVMAPGVSIQSTLPGNKYGALNGTSMASPHVAGAAALILSKHPNWTNTQVRSSLENTTTKLGDSFYYGKGLINVQAAAQ

SEQ ID NO: 70637 - protein, 275 aa, Bacillus amyloliquefaciens
AQSVPYGVSQIKAPALHSQGYTGSNVKVAVIDSGIDSSHPDLKVAGGASMVPSETNPFLDNNSHGTHVAGTVAALNNSIGVLGVAPSASLYAVKVLGADGSGQYSWIINGIEWAIANNMDVINMSLGGGSGSAALKAAVDKAVASGVVVVAAAGNEGTSGSSSTVGYPGKYPSVIAVGAVDSSNQRASFSSVGPELDVMAPGVSIQSTLPGNKYGALNGTSMASPHVAGAAALILSKHPNWTNTQVRSSLENTTTKLGDSFYYGKGLINVQAAAQ

SEQ ID NO: 70638 - protein, 275 aa, Bacillus sp.
AQTTPWGVTHINAHRAHSSGVTGSGVKVAILDTGIHASHPDLNVRGGASFISGESNPYIDSNGHGTHVAGTVAALNNTVGVLGVAYNAELYAVKVLSASGSGTLSGIAQGVEWSIANKMDVINMSLGGSSGSTALQRAVDNAYRNNIVVVAAAGNSGAQGNRNTIGYPARYSSVIAVGAVDSNNNRASFSSVGSELEVMAPGVSILSTVPGSSYASYNGTSMASPHVAGAAALLKAKYPNWSAAQIRNKLNSTTTYLGSSFYYGNGVINVERALQ

SEQ ID NO: 70639 - protein, 274 aa, Bacillus amyloliquefaciens
AQSVPYGVSQIKATALHSQGYTGSNVKVAVIDSGIDSSHPDLKVAGGASMVPGESAFQDNNSHGTHVAGTVAALNNSIGVLGVAPSASLYAVKVLGADGSGQYSWIINGIEWAIANNMDVINMSLGGPSGSAALKAAVDKAVASGVVVVAAAGNEGTSGSSSTVGYPGKYPSVIAVGAVDSSNQRASFSSVGPELDVMAPGVSIQSTLPGNKYGAYNGTSMASPHVAGAAALILSKHPNWTNTQVRSSLENTTTKLGDSFYYGKGLINVQAAAQ

SEQ ID NO: 70640 - protein, 275 aa, Bacillus sp.
AQTVPWGIPHIKADKAHAAGVTGSGVKVAILDTGIDANHADLNVKGGASFVSGEPNALQDGNGHGTHVAGTVAALDNTTGVLGVAYNADLYAVKVLSASGSGTLSGIAQGIEWSISNRMNVINMSLGDFYGSTALQQACNNAYNRGIVVIAAAGNNGSSGNRNTMDYPARYSSVIAVGAVSSNNTRASFSSVGSELEVMAPGVNILSTTPGNNYASFNGTSMAAPHVAGAAALIKAKYPSMTNVQIRNRLKNTATNLGDPFFYGKGVINVEKALQ

SEQ ID NO: 70641 - protein, 275 aa, Bacillus amyloliquefaciens
AQSVPYGVSQIKAPALHSQGYTGSNVKVAVIDSGIDSSHPDLKVAGGASMVPSETNPFQDNNSHGTHVAGTVAALNNSIGVLGVAPSASLYAVKVLGADGSGQYSWIINGIEWAIANNMDVINMSLGGPSGSAALKAAVDKAVASGVVVVAAAGNEGTSGSSSTVGYPGKYPSVIAVGAVDSSNQRASFSSVGPELDVMAPGVSIQSTLPGNQYGALNGTSMASPHVAGAAALILSKHPNWTNTQVRSSLENTTTKLGDSFYYGKGLINVQAAAQ

SEQ ID NO: 70642 - protein, 275 aa, Bacillus amyloliquefaciens
AQSVPYGVSQIKAPALHSQGYTGSNVKVAVIDGGIDSSHPDLKVAGGASMVPSETNPFQDNNSHGTHVAGTVAALNNSIGVLGVAPSASLYAVKVLGADGSGQYSWIINGIEWAIANNMDVINMSLGGPSGSAALKAAVDKAVASGVVVVAAAGNEGTSGSSSTVGYPGKYPSVIAVGAVDSSNQRASFSSVGPELDVMAPGVSIQSTLPGNKYGALNGTSMASPHVAGAAALILSKHPNWTNTQVRSSLENTTTKLGDSFYYGKGLINVQAAAQ

SEQ ID NO: 70643 - protein, 275 aa, Synthetic construct
AQSVPYGVSQIKAPALHSQGYTGSNVKVAVIDSGIDSSHPDLKVAGGASMVPSETNPFQDNNSHGTHVAGTVAALNNSIGVLGVAPSASLYAVKVLGADGSGQYSWIINGIEWAIANNMDVINMSLGGPSGSAALKAAVDKAVASGVVVVAAAGNEGTSGSSSTVGYPGKYPSVIAVGAVDSSNQRASFSSVGPELDVMAPGVSIQSTLPGNKYGALNGTSMASPHVAGAAALILSKHPNWTNTQVRSSLENTTTKLGDSFYYGKGLINVQAAAQ

SEQ ID NO: 70644 - protein, 275 aa, Bacillus sp.
AQTVPWGIPHIKADKAHAAGVTGSGVKVAILDTGIDANHADLNVKGGASFVTGEPNALQDGNGHGTHVAGTVAALNNTTGVLGVAYNADLYAVKVLSASGSGTLSGIAQGIEWSISNGMNVINMSLGVMHGSTALQQACNNAYNRGIVVIAAAGNDGSSGNRNTMDYPARYSSVIAVGAVSSNNTRASFSSVGSELEVMAPGVNILSTTPGNNYASRNGTSMAAPHVAGAAALIKAKYPSMTNVQIRNRLKNTATNLGDPFFYGKGVINVEKALQ

SEQ ID NO: 70645 - protein, 274 aa, Bacillus amyloliquefaciens
AQSVPYGVSQIKAPALHSQGYTGSNVKVAVIDSGIDSSHPDLKVAGGASMVPSETNFQDNNSHGTHVAGTVAALNNSIGVLGVAPSASLYAVKVLGADGSGQYSWIINGIEWAIANNMDVINMSLGGPSGSAALKAAVDKAVASGVVVVAAAGNEGTSGSSSTVGYPGKYPSVIAVGAVDSSNQRASFSSVGPELDVMAPGVSIQSTLPGNKYGALNGTSMASPHVAGAAALILSKHPNWTNTQVRSSLENTTTKLGDSFYYGKGLINVQAAAQ

SEQ ID NO: 70646 - protein, 275 aa, unidentified
AQSVPYGVSQIKAPALHSQGYTGSNVKVAVIDSGIDSSHPDLKVAGGASMVPSETNPFQDNNSHGTHVAGTVAALNNSIGVLGVAPSASLYAVKVLGADGSGQYSWIINGIEWAIANNMDVINMSLGGPSGSAALKAAVDKAVASGVVVVAAAGNEGTSGSSSTVGYPGKYPSVIAVGAVDSSNQRASFSSVGPELDVMAPGVEIESTLPGNEYGELNGTSMASPHVAGAAALILSKHPNWTNTQVRSSLENTTTKLGDSFYYGKGLINVQAAAQ

SEQ ID NO: 70647 - protein, 275 aa, Synthetic construct
AQSVPYGVSQIKAPALHSQGYTGSNVKVAVIDSGIDSSHPDLKVAGGASMVPSETNPFQDNNSHGTHVAGTVAALNNSIGVLGVAPSASLYAVKVLGADGSGQYSWIINGIEWAIANNMDVINMSLGGPSGSAALKAAVDKAVASGVVVVAAAGNEGTSGSSSTVGYPGKYPSVIAVGAVDSSNQRASFSSVGPELDVMAPGVSIQSTLPGNEYGELNGTSMASPHVAGAAALILSKHPNWTNTQVRSSLENTTTKLGDSFYYGKGLINVQAAAQ

SEQ ID NO: 70648 - protein, 274 aa, Bacillus amyloliquefaciens
AQSIPYGVSQIKAPALHSQGYTGSNVKVAVIDSGIDSSHPDLKVAGGASMVPGESAFQDNNSHGTHVAGTVAALNNSIGVLGVAPSASLYAVKVLGADGSGQYSWIINGIEWAIANNMDVINMSLGGPSGSAALKAAVDKAVASGVVVVAAAGNEGTSGSSSTVGYPGKYPSVIAVGAVDSSNQRASFSSVGPELDVMAPGVSIQSTLPGNKYGALNGTSMASPHVAGAAALILSKHPNWTNTQVRSSLENTTTKLGDSFYYGKGLINVQAAAQ

SEQ ID NO: 70649 - protein, 275 aa, Bacillus sp.
AQTVPWGIPHIKADKAHAAGVTGSGVKVAILDTGIDANHADLNVKGGASFVSGEPNALQDGNGHGTHVAGTVAALNNTTGVLGVAYNADLYAVKVLSASGSGTLSGIAQGIEWSISNRMNVINMSLGMLQGSTALQQACNNAYNRGIVVIAAAGNSGSSGNRNTMDYPARYSSVIAVGAVSSNNTRASFSSVGSELEVMAPGVNILSTTPGNNYASFNGTSMAAPHVAGAAALIKAKYPSMTNVQIRNRLKNTATNLGDPFFYGKGVINVESALQ

SEQ ID NO: 70650 - protein, 275 aa, Bacillus amyloliquefaciens
AQSVPYGVSQIKAPALHSQGYTGSNVKVAVIDSGIDSSHPDLKVAGGASMVPSETNPFQDNNSHGTHVAGTVAALNNSIGVLGVAPSASLYAVKVLGADGSGQYSWIINGIEWAIANNMDVINMSLGGPSGSAALKAAVDKAVASGVVVVAAAGNEGTSGSSSTVGYPGKYPSVIAVGAVDSSNQRASFSSVGPELDVMAPGVSIQSTLPTNKYGAYNGTSMASPHVAGAAALILSKHPNWTNTQVRSSLENTTTKLGDSFYYGKGLINVQAAAQ

SEQ ID NO: 70651 - protein, 275 aa, Synthetic construct
AQVVPWGIPHIKADKAHASGVTGSGVKVAVLDTGIDANHADLNVKGGASFVSGEPNALQDGNGHGTHVAGTVAALNNNTGVLGVAYNAFLYAVKVLGASGSGTLSGIAQGIEWSIANDMDVINMSLGIPTGSTALQQACNNAYASGIVVVAAAGNSGSNGKRNTMGYPARYSSVIAVGAVDSSNNRASFSSVGSELEVMAPGVSILSTTPGNNYESFNGTSMASPHVAGAAALIKAKYPSMTNVQIRNKLKNTATNLGDAFYYGHGVINVEKALQ

SEQ ID NO: 70652 - protein, 275 aa, Bacillus amyloliquefaciens
AQSVPYGVSQIKAPALYSQGYTGSNVKVAVIDSGIDSSHPDLKVAGGASMVPSETNPFQDNNSHGTHVAGTVAALNNSIGVLGVAPSASLYAVKVLGRIGSGQYSWIINGIEWAIANNMDVINMSLGGPSGSAALKAAVDKAVASGVVVVAAAGNEGTSGSSSTVGYPGKYPSVIAVGAVDSSNQRASFSSVGPELDVMAPGVSIQSTLPGNKYGALNGTSMASPHVAGAAALILSKHPNWTNTQVRSSLENTTTKLGDSFYYGKGLINVQAAAQ

SEQ ID NO: 70653 - protein, 275 aa, Bacillus amyloliquefaciens
AQSVPYGVSQIKAPALHSQGYTGSNVKVAVIDSGIDSSHPDLKVAGGASMVPSETNPFQDNNSHGTHVAGTVAALNNSIGVLGVAPSASLYAVKVLSCRGSGQYSWIINGIEWAIANNMDVINMSLGGPSGSAALKAAVDKAVASGVVVVAAAGNEGTSGSSSTVGYPGKYPSVIAVGAVDSSNQRASFSSVGPELDVMAPGVSIQSTLPGNKYGALNGTSMASPHVAGAAALILSKHPNWTNTQVRSSLENTTTKLGDSFYYGKGLINVQAAAQ

SEQ ID NO: 70654 - protein, 275 aa, Bacillus sp.
AQTVPWGIPHIKADKAHAAGVTGSGVKVAILDTGIDANHADLNVKGGASFVFGEPNALQDGNGHGTHVAGTVAALDNTTGVLGVAYNADLYAVKVLSASGSGTLSGIAQGIEWSISNRMNVINMSLGDFYGSTALQQACNNAYNRGIVVIAAAGNNGSSGNRNTMDYPARYSSVIAVGAVSSNNTRASFSSVGSELEVMAPGVNILSTTPGNNYASFNGTSMAAPHVAGAAALIKAKYPSMTNVQIRNRLKNTATNLGDPFFYGKGVINVEKALQ

SEQ ID NO: 70655 - protein, 275 aa, Bacillus amyloliquefaciens
AQSVPYGVSQIKAPALHSQGYTGSNVKVAVIDSGIDSSHPDLKVAGGASMVPSETNPFQDNNSHGTHVAGTVAALNNSIGVLGVAPSASLYAVKVLGADGSGQYSWIINGIEWAIANNMDVINMSLGGSSGSAALKAAVDKAVASGVVVVAAAGNEGTSGSSSTVGYPGKYPSVIAVGAVDSSNQRASFSSVGPELDVMAPGVSIQSTLPGNKYGALNGTSMASPHVAGAAALILSKHPNWTNTQVRSSLENTTTKLGDSFYYGKGLINVQAAAQ

SEQ ID NO: 70656 - protein, 275 aa, Bacillus amyloliquefaciens
AQTVPYGVSQIKAPALHSQGYTGSNVKVAVIDSGIDSSHPDLKVAGGASMVPSETNPFQDNNSHGTHVAGTVAALNNSIGVLGVAPSASLYAVKVLGADGSGQYSWIINGIEWAIANNMDVINMSLGGPSGSAALKAAVDKAVASGVVVVAAAGNEGTSGSSSTVGYPGKYPSVIAVGAVDSSNQRASFSSVGPELDVMAPGVSIQSTLPGNKYGAYNGTSMASPHVAGAAALILSKHPNWTNTQVRSSLENTTTKLGDSFYYGKGLINVQAAAQ

SEQ ID NO: 70657 - protein, 275 aa, Bacillus amyloliquefaciens
AQSVPYGVSQIKAPALHSQGYTGSNVKVAVIDSGIDSSHPDLKVAGGASMVPSETNPFQDNNSHGTHVAGTVAALNNSIGVLGVAPSASLYAVKVLGADGSGQYSWIINGIEWAIANNMDVINMSLGGPSGSAALKAAVDKAVASGVVVVAAAGNEGTSGSSSTVGYPGKYPSVIAVGAVDSSNQRASFSSVGPELDVMAPGVSIQSTLPGNKYGAYNGTSMASPHVAGAAALILSKHPNWTNTQVRSSLENTATKLGDSFYYGKGLINVQAAAQ

SEQ ID NO: 70658 - protein, 275 aa, Bacillus amyloliquefaciens
AQSVPYGVSQIKAPALHSQGYTGSNVKVAVIDSGIDSSHPDLKVAGGASMVPSETNPFQDNNSHGTHVAGTVAALNNSIGVLGVAPSASLYAVKVLRCDGSGQYSWIINGIEWAIANNMDVINMSLGGPSGSAALKAAVDKAVASGVVVVAAAGNEGTSGSSSTVGYPGKYPSVIAVGAVDSSNQRASFSSVGPELDVMAPGVSIQSTLPGNKYGALNGTSMASPHVAGAAALILSKHPNWTNTQVRSSLENTTTKLGDSFYYGKGLINVQAAAQ

SEQ ID NO: 70659 - protein, 275 aa, Bacillus amyloliquefaciens
AQSVPYGVSQIKAPALRSQGYTGSNVKVAVIDSGIDSSHPDLKVAGGASMVPSETNPFQDNNSHGTHVAGTVAALNNSIGVLGVAPSASLYAVKVLGADGSGQYSWIINGIEWAIANNMDVINMSLGGPSGSAALKAAVDKAVASGVVVVAAAGNEGTSGSSSTVGYPGKYPSVIAVGAVDSSNQRASFSSVGPELDVMAPGVSIQSTLPGNKYGALNGTSMASPHVAGAAALILSKHPNWTNTQVRSSLENTTTKLGDSFYYGKGLINVQAAAQ

SEQ ID NO: 70660 - protein, 275 aa, Bacillus amyloliquefaciens
AQSVPYGVSQIKAPALHSQGYTGSNVKVAVIDSGIDSSHPDLKVAGGASMVPSETNPFQDNNSHGTHVAGTVAALNNSIGVLGVAPSASLYAVKVLGADGDGSYSWIINGIEWAIANNMDVINMSLGGPSGSAALKAAVDKAVASGVVVVAAAGNEGTSGSSSTVGYPGKYPSVIAVGAVDSSNQRASFSSVGPELDVMAPGVSIQSTLPGNKYGALNGTSMASPHVAGAAALILSKHPNWTNTQVRSSLENTTTKLGDSFYYGKGLINVQAAAQ

SEQ ID NO: 70661 - protein, 274 aa, Bacillus amyloliquefaciens
AQSVPYGVSQIKAPALHSQGYTGSNVKVAVIDSGIDSSHPDLKVAGGASMVPSESAFQDNNSHGTHVAGTVAALNNSIGVLGVAPSASLYAVKVLGADGSGQYSWIINGIEWAIANNMDVINMSLGGPSGSAALKAAVDKAVASGVVVVAAAGNEGTSGSSSTVGYPGKYPSVIAVGAVDSSNQRASFSSVGPELDVMAPGVSIQSTLPGNKYGALNGTSMASPHVAGAAALILSKHPNWTNTQVRSSLENTTTKLGDSFYYGKGLINVQAAAQ

SEQ ID NO: 70662 - protein, 275 aa, Bacillus amyloliquefaciens
AQSVPYGVSQIKAPALHSQGYTGSNVKVAVIDSGIDSSHPDLKVAGGASMVPSETNPFQDNNSHGTHVAGTVAALNNSIGVLGVAPSASLYAVKVLRGCGSGQYSWIINGIEWAIANNMDVINMSLGGPSGSAALKAAVDKAVASGVVVVAAAGNEGTSGSSSTVGYPGKYPSVIAVGAVDSSNQRASFSSVGPELDVMAPGVSIQSTLPGNKYGALNGTSMASPHVAGAAALILSKHPNWTNTQVRSSLENTTTKLGDSFYYGKGLINVQAAAQ

SEQ ID NO: 70663 - protein, 275 aa, Bacillus amyloliquefaciens
AQSVPYGVSQIKAPALHSQGYTGSNVKVAVIDSGIDSSHPDLNVAGGASMVPSETNPFQDNNSHGTHVAGTVAALNNSIGVLGVAPSASLYAVKVLGADGSGQYSWIINGIEWAIANNMDVINMSLGGPSGSAALKAAVDKAVASGVVVVAAAGNEGTSGSSSTVGYPGKYPSVIAVGAVDSSNQRASFSSVGPELDVMAPGVSIQSTLPGNKYGAYNGTSMASPHVAGAAALILSKHPNWTNTQVRSSLENTTTKLGDSFYYGKGLINVQAAAQ

SEQ ID NO: 70664 - protein, 275 aa, Bacillus amyloliquefaciens
AQSVPYGVSQIKAPALHSQGYTGSNVKVAVIDSGIDSSHPDLKVAGGASMVPSETNPFQDNNSHGTHVAGTVAALNNSIGVLGVAPSASLYAVKVLVRGGSGQYSWIINGIEWAIANNMDVINMSLGGPSGSAALKAAVDKAVASGVVVVAAAGNEGTSGSSSTVGYPGKYPSVIAVGAVDSSNQRASFSSVGPELDVMAPGVSIQSTLPGNKYGALNGTSMASPHVAGAAALILSKHPNWTNTQVRSSLENTTTKLGDSFYYGKGLINVQAAAQ

SEQ ID NO: 70665 - protein, 274 aa, Bacillus amyloliquefaciens
AQSVPYGVSQIKAPALHSQGYTGSNVKVAVIDSGIDSSHPDLKVAGGASMVPGESAFQDNNSHGTHVAGTVAALNNSIGVLGVAPSASLYAVKVLGADGNGQYSWIINGIEWAIANNMDVINMSLGGPSGSAALKAAVDKAVASGVVVVAAAGNEGTSGSSSTVGYPGKYPSVIAVGAVDSSNQRASFSSVGPELDVMAPGVSIQSTLPGNKYGALNGTSMASPHVAGAAALILSKHPNWTNTQVRSSLENTTTKLGDSFYYGKGLINVQAAAQ

SEQ ID NO: 70666 - protein, 275 aa, Bacillus sp.
AQTVPWGIPHIKADKAHAAGVTGTGVKVAILDTGIDANHADLNVKGGASFVSEEPNALQDGNGHGTHVAGTVAALNNTTGVLGVAYNADLYAVKVLSASGSGTLSGIAQGIEWSISNGMNVINMSLGGSSGSTALQQACNNAYNRGIVVIAAAGNSGSSGNRNTMDYPARYSSVIAVGAVSSNNTRASFSSVGSELEVMAPGVNILSTTPGNNYASFNGTSLAAPHVAGAAALIKAKYPSMTNVQIRERLKNTATPLGDPFFYGKGVINVESALQ

SEQ ID NO: 70667 - protein, 275 aa, unidentified
AQSVPYGVSQIKAPALHSQGYTGSNVKVAVIDSGIDSSHPDLKVAGGASMVPSETNPFQDNNSHGTHVAGTVAALNNSIGVLGVAPSASLYAVKVLGADGSGQYSWIINGIEWAIANNMDVINMSLGGPSGSAALKAAVDKAVASGVVVVAAAGNEGTSGSSSTVGYPGKYPSVIAVGAVDSSNQRASFSSVGPELDVMAPGVSIESTLPGNKYGELNGTSMASPHVAGAAALILSKHPNWTNTQVRSSLENTTTKLGDSFYYGKGLINVQAAAQ

SEQ ID NO: 70668 - protein, 275 aa, Bacillus amyloliquefaciens
AQSVPYGVSQIKAPALHSQGYTGSNVKVAVIDSGIDSSHPDLKVAGGASMVPSETNPFQDNNSHGTHVAGTVAALNNSIGVLGVAPSASLYAVKVLGVGGSGQYSWIINGIEWAIANNMDVINMSLGGPSGSAALKAAVDKAVASGVVVVAAAGNEGTSGSSSTVGYPGKYPSVIAVGAVDSSNQRASFSSVGPELDVMAPGVSIQSTLPGNKYGALNGTSMASPHVAGAAALILSKHPNWTNTQVRSSLENTTTKLGDSFYYGKGLINVQAAAQ

SEQ ID NO: 70669 - protein, 275 aa, Bacillus amyloliquefaciens
AQSVPYGVSQIKAPALHSQGYTGSNVKVAVIDSGIDSSHPDLKVAGGASMVPSETNPFQDNNSHGTHVAGTVAALNNSIGVLGVAPSASLYAVKVLGADGSGQYSWIIDGIEWAIANNMDVINMSLGGPSGSAALKAAVDKAVASGVVVVAAAGNEGTSGSSSTVGYPGKYPSVIAVGAVDSSNQRASFSSVGPELDVMAPGVSIQSTLPGNKYGALNGTSMASPHVAGAAALILSKHPNWTNTQVRRSLENTTTKLGDSFYYGKGLINVQAAAQ

SEQ ID NO: 70670 - protein, 275 aa, Bacillus amyloliquefaciens
AQSVPYGVSQIKAPALHSQGYTGSNVKVVVIDSGIDSSHPDLKVAGGASMVPSETNPFQDNNSHGTHVAGTVAALNNSIGVLGVAPSASLYAVKVLRSDGSGQYSWIINGIEWAIANNMDVINMSLGGPSGSAALKAAVDKAVASGVVVVAAAGNEGTSGSSSTVGYPGKYPSVIAVGAVDSSNQRASFSSVGPELDVMAPGVSIQSTLPGNKYGALNGTSMASPHVAGAAALILSKHPNWTNTQVRSSLENTTTKLGDSFYYGKGLINVQAAAQ

SEQ ID NO: 70671 - protein, 275 aa, Bacillus amyloliquefaciens
AQSVPYGVSQIKAPALHSQGYTGSNVKVAVIDSGIDSSHPDLKVAGGASMVPGETNPGQDNNSHGTHVAGTVAALNNNIGVLGVAPSASLYAVKVLGADGSGQYSWIINGIEWAIANNMDVINMSLGGPSGSAALKAAVDKAVASGVVVVAAAGNEGTSGSSSTVGYPGKYPSVIAVGAVDSSNQRASFSSVGPELDVMAPGVSIQSTLPGNKYGAYNGTSMASPHVAGAAALILSKHPNWTNTQVRSSLENTTTKLGDSFYYGKGLINVQAAAQ

SEQ ID NO: 70672 - protein, 275 aa, Synthetic construct
AQSVPYGVSQIKAPALHSQGYTGSNVKVAVIDSGIDSSHPDLKVAGGASMVPSETNPFQDNNSHGTHVAGTVAALNNSIGVLGVAPSASLYAVKVLGADGSGQYSWIINGIEWAIANNMDVINMSLGGPSGSAALKAAVDKAVASGVVVVAAAGNEGTSGSSSTVGYPGKYPSVIAVGAVDSSNQRASFSSVGPELDVMAPGVSIQSTLPGNEYGALNGTSMASPHVAGAAALILSKHPNWTNTQVRSSLENTTTKLGDSFYYGKGLINVQAAAQ

SEQ ID NO: 70673 - protein, 275 aa, Bacillus amyloliquefaciens
AQSVPYGVSQIKAPALHSQGYTGSNVKVAVIDSGIDSSHPDLKVAGGASMVPSETNPFQDNNSHGTHVAGTVAALNNSIGVLGVAPSASLYAVKVLDRGGSGQYSWIINGIEWAIANNMDVINMSLGGPSGSAALKAAVDKAVASGVVVVAAAGNEGTSGSSSTVGYPGKYPSVIAVGAVDSSNQRASFSSVGPELDVMAPGVSIQSTLPGNKYGALNGTSMASPHVAGAAALILSKHPNWTNTQVRSSLENTTTKLGDSFYYGKGLINVQAAAQ

SEQ ID NO: 70674 - protein, 275 aa, Bacillus amyloliquefaciens
AQSVPYGVSQIKAPALHSQGYTGSNVKVAVIDSGIDSSHPDLKVAGGASMVPSETNPFQDNNSHGTHVAGTVAALNNSIGVLGVAPSASLYAVKVLGRVGSGQYSWIINGIEWAIANNMDVINMSLGGPSGSAALKAAVDKAVASGVVVVAAAGNEGTSGSSSTVGYPGKYPSVIAVGAVDSSNQRASFSSVGPELDVMAPGVSIQSTLPGNKYGALNGTSMASPHVAGAAALILSKHPNWTNTQVRSSLENTTTKLGDSFYYGKGLINVQAAAQ

SEQ ID NO: 70675 - protein, 275 aa, Bacillus amyloliquefaciens
AQSVPYGVSQIKAPALHSQGYTGGNVKVAVIDTGIDSSHPDLKVAGGASMVPGETNPFQDGNGHGTHVAGTVAALNNNIGVLGVAPSASLYAVKVLGADGNGQYSWIIGGIEWAIANNMDVINMSLGSPSHSAALKAAVDKAVASGVVVVAAAGNEGTSGSSSTVGYPAKYPSVIAVGAVDSSNQRASFSSVGPELDVMAPGVSIQSTLPGNKYGAQSGTSMASPHVAGAAALILSKHPNWTVTQVRSSLENTTTKLGDSFYYGKGLINVQAAAQ

SEQ ID NO: 70676 - protein, 275 aa, Bacillus sp.
AQTVPWGIPHIKADKAHAAGVTGSGVKVAILDTGIDANHADLNVKGGASFVSGEPNALQDGNGHGTHVAGTVAALDNTTGVLGVAYNADLYAVKVLSASGSGTLSGIAQGIEWSISNRMNVINMSLGDFYGSTALQQACNNAYNRGIVVIAAAGNNGSSGNRNTMDYPARYSSVIAVGAVSSNNTRASFSSVGSELEVMAPGVNILSTTPGNNYASRNGTSMAAPHVAGAAALIKAKYPSMTNVQIRNRLKNTATNLGDPFFYGKGVINVESALQ

SEQ ID NO: 70677 - protein, 275 aa, Bacillus amyloliquefaciens
AQSVPYGVSQIKAPALHSQGYTGSNVKVAVIDSGIDSSHPDLKVAGGASMVPSETNPFQDNNSHGTHVAGTVAALNNSIGVLGVAPSASLYAVKVLSNGGSGQYSWIINGIEWAIANNMDVINMSLGGPSGSAALKAAVDKAVASGVVVVAAAGNEGTSGSSSTVGYPGKYPSVIAVGAVDSSNQRASFSSVGPELDVMAPGVSIQSTLPGNKYGALNGTSMASPHVAGAAALILSKHPNWTNTQVRSSLENTTTKLGDSFYYGKGLINVQAAAQ

SEQ ID NO: 70678 - protein, 275 aa, Bacillus amyloliquefaciens
AQSVPYGVSQIKAPALHSQGYTGSNVKVAVIDSGIDSSHPDLKVAGGASMVPSETNPFQDNNSHGTHVAGTVAALNNSIGVLGVAPSASLYAVKVLGRIGSGQYSWIINGIEWAIANNMDVINMSLGGPSGSAALKAAVDKAVASGVVVVAAAGNEGTSGSSSTVGYPGKYPSVIAVGAVDSSNQRASFSSVGPELDVMAPGVSIQSTLPGNKYGALNGTSMASPHVAGAAALILSKHPNWTNTQVRSSLENTTTKLGDSFYYGKGLINVQAAAQ

SEQ ID NO: 70679 - protein, 275 aa, Bacillus amyloliquefaciens
AQSVPYGVSQIKAPALHSQGYTGSNVKVAVIDSGIDSSHPDLKVAGGASMVPSETNPFQDNNSHGTHVAGTVAALNNSIGVLGVAPSASLYAVKVLGADGSGQYSWIINGIEWAIANNMDVINMSLGGPSGSAALKAAVDKAVASGVVVVAAAGNEGTSGSSSTVGYPGKYPSVIAVGAVDSSNQRASFSSVGPELDVMAPGVSIQSTLPGNNYGALNGTSMASPHVAGAAALILSKHPNWTNTQVRSSLENTTTKLGDSFYYGKGLINVQAAAQ

SEQ ID NO: 70680 - protein, 275 aa, Bacillus amyloliquefaciens
AQSVPYGVSQIKAPALHSQGYTGSNVKVAVIDSGIDSSHPDLKVAGGASMVPSETNPFQDNNSHGTHVAGTVAALNNSIGVLGVAPSASLYAVKVLVRDGSGQYSWIINGIEWAIANNMDVINMSLGGPSGSAALKAAVDKAVASGVVVVAAAGNEGTSGSSSTVGYPGKYPSVIAVGAVDSSNQRASFSSVGPELDVMAPGVSIQSTLPGNKYGALNGTSMASPHVAGAAALILSKHPNWTNTQVRSSLENTTTKLGDSFYYGKGLINVQAAAQ

SEQ ID NO: 70681 - protein, 275 aa, Bacillus amyloliquefaciens
AQSVPYGVSQIKAPALHSQGYTGSNVKVAVIDSGIDSSHPDLKVAGGASMVPSETNPFQDNNSHGTHVAGTVAALNNSIGVLGVAPSASLYAVKVLDHRGSGQYSWIINGIEWAIANNMDVINMSLGGPSGSAALKAAVDKAVASGVVVVAAAGNEGTSGSSSTVGYPGKYPSVIAVGAVDSSNQRASFSSVGPELDVMAPGVSIQSTLPGNKYGALNGTSMASPHVAGAAALILSKHPNWTNTQVRSSLENTTTKLGDSFYYGKGLINVQAAAQ

SEQ ID NO: 70682 - protein, 275 aa, Bacillus amyloliquefaciens
AQSVPYGVSQIKAPALHSQGYTGSNVKVAVIDSGIDSSHPDLKVAGGASMVPGESXAFQDNNSHGTHVAGTVAALNNSIGVLGIAPSASLYAVKVLGADGSGQYSWIINGIEWAIANNMDVINMSLGGPSGSAALKAAVDKAVASGVVVVAAAGNEGTSGSSSTVGYPGKYPSVIAVGAVDSSNQRASFSSVGPELDVMAPGVSIQSTLPGNKYGALNGTSMASPHVAGAAALILSKHPNWTNTQVRSSLENTTTKLGDSFYYGKGLINVQAAAQ

SEQ ID NO: 70683 - protein, 274 aa, Bacillus amyloliquefaciens
AQSVPYGVSQIKAPALHSQGYTGSNVKVAVIDSGIDSSHPDLKVAGGASMVPGESAFQDNNSHGTHVAGTVAALNNSIGVLGIAPSASLYAVKVLGADGSGQYSWIINGIEWAIANNMDVINMSLGGPSGSAALKAAVDKAVASGVVVVAAAGNEGTSGSSSTVGYPGKYPSVIAVGAVDSSNQRASFSSVGPELDVMAPGVSIQSTLPGNKYGALNGTSMASPHVAGAAALILSKHPNWTNTQVRSSLENTTTKLGDSFYYGKGLINVQAAAQ

SEQ ID NO: 70684 - protein, 275 aa, Bacillus amyloliquefaciens
AQSVPYGVSQIKAPALHSQGYTGSNVKVAVIDTGIDSSHPDLKVAGGASMVPSETNPFQDNNSHGTHVAGTVAALDNSIGVLGVAPSASLYAVKVLGADGSGQYSWIINGIEWAIANNMDVINMSLGGPSGSAALKAAVDKAVASGVVVVAAAGNEGTSGSSSTVGYPGKYPSVIAVGAVDSSNQRASFSSVGPELDVMAPGVSIQSTLPGNKYGAYSGTSMASPHVAGAAALILSKHPNWTNTQVRSSLENTTTKLGDSFYYGKGLINVQAAAQ

SEQ ID NO: 70685 - protein, 275 aa, Bacillus amyloliquefaciens
AQSVPYGVSQIKAPALHSQGYTGSNVKVAVIDSGIDSSHPDLKVAGGASMVPSETNPFQDNNSHGTHVAGTVAALNNSIGVLGVAPSASLYAVKVLGHGGSGQYSWIINGIEWAIANNMDVINMSLGGPSGSAALKAAVDKAVASGVVVVAAAGNEGTSGSSSTVGYPGKYPSVIAVGAVDSSNQRASFSSVGPELDVMAPGVSIQSTLPGNKYGALNGTSMASPHVAGAAALILSKHPNWTNTQVRSSLENTTTKLGDSFYYGKGLINVQAAAQ

SEQ ID NO: 70686 - protein, 275 aa, Bacillus amyloliquefaciens
AQSVPYGVSQIKAPALHSQGYTGSNVKVAVIDSGIDSSHPDLKVAGGASMVPSETNPFQDNNSHGTHVAGTVAALNNSIGVLGVAPSASLYAVKVLGADGSGQYSWIINGIEWAIANNMDVINMSLNGGSGSTALKAAVDKAVASGVVVVAAAGNEGTSGSSSTVGYPGKYPSVIAVGAVDSSNQRASFSSVGPELDVMAPGVSIQSTLPGNKYGALNGTSMASPHVAGAAALILSKHPNWTNTQVRSSLENTTTKLGDSFYYGKGLINVQAAAQ

SEQ ID NO: 70687 - protein, 275 aa, Bacillus sp.
AQTVPWGIPHIKADKAHAAGVTGSGVKVAILDTGIDANHADLNVKGGASFVSGEPNALQDGNGHGTHVAGTVAALDNTTGVLGVAYNADLYAVKVLSASGSGTLSGIAQGIEWSISNRMNVINMSLGDFYGSTALQQACNNAYNRGIVVIAAAGNNGSSGNRNTMDYPARYSSVIAVGAVSSNNTRASFSSVGSELEVMAPGVNILSTTPGNNYASFNGTSMAAPHVAGAAALIKAKYPSMTNVQIRNRLKNTATRLGDPFFYGKGVINVESALQ

SEQ ID NO: 70688 - protein, 275 aa, Bacillus amyloliquefaciens
AQSIPYGVSQIKAPALHSQGYTGSNVKVAVIDSGIDSSHPDLKVAGGASMVPGESXAFQDNNSHGTHVAGTVAALNNSIGVLGVAPSASLYAVKVLGADGSGQYSWIINGIEWAIANNMDVINMSLGGPSGSAALKAAVDKAVASGVVVVAAAGNEGTSGSSSTVGYPGKYPSVIAVGAVDSSNQRASFSSVGPELDVMAPGVSIQSTLPGNKYGALNGTSMASPHVAGAAALILSKHPNWTNTQVRSSLENTTTKLGDSFYYGKGLINVQAAAQ

SEQ ID NO: 70689 - protein, 275 aa, Bacillus amyloliquefaciens
AQTVPYGVSQIKAPALHSQGYTGSNVKVAVIDSGIDSSHPDLKVAGGASMVPSETNPFQDNNSHGTHVAGTVAALDNNIGVLGVAPSASLYAVKVLGADGSGQYSWIINGIEWAIANNMDVINMSLGGPSGSAALKAAVDKAVASGVVVVAAAGNEGTSGSSSTVGYPGKYPSVIAVGAVDSSNQRASFSSVGPELDVMAPGVSIQSTLPGNKYGAYSGTSMASPHVAGAAALILSKHPNWTNTQVRSSLENTTTKLGDSFYYGKGLINVQAAAQ

SEQ ID NO: 70690 - protein, 275 aa, Bacillus amyloliquefaciens
AQSVPYGVSQIKAPALHSQGHTGSNVKVAVIDSGIDSSHPDLKVAGGASMVPSETNPFQDNNSHGTHVAGTVAALNNSIGVLGVAPSASLYAVKVLGADGSGQYSWIINGIEWAIANNMDVINMSLGGPSGSAALKAAVDKAVASGVVVVAAAGNEGTSGSSSTVGYPGKYPSVIAVGAVDSSNQRASFSSVGPELDVMAPGVSIQSTLPGNKYGALNGTSMASPHVAGAAALILSKHPNWTNTQVRSSLENTTTKLGDSFYYGKGLINVQAAAQ

SEQ ID NO: 70691 - protein, 275 aa, Synthetic construct
AQVVPWGIPHIKADKAHASGVTGSGVKVAVLDTGIDANHADLNVKGGASFVSGEPNALQDGNGHGTHVSGTVAALNNTTGVLGVAYNAFLYAVKVLGASGSGTLSGIAQGIEWSIANDMDVINMSLGIPTGSTALQQACNNAYASGIVVVAAAGNSGSNGKRNTMGYPARYSSVIAVGAVDSSNNRASFSSVGSELEVMAPGVSILSTTPGNNYESFNGTSMASPHVAGAAALIKAKYPSMTNVQIRNKLKNTATNLGDAFYYGHGVINVEKALQ

SEQ ID NO: 70692 - protein, 275 aa, Bacillus amyloliquefaciens
AQSVPYGVSQIKAPALHSQGYTGSNVKVAVIDSGIDSSHPDLKVAGGASMVPSEXNPFQDNNSHGTHVAGTVAALNNSIGVLGVAPSASLYAVKVLGADGSGQYSWIINGIEWAIANNMDVINMSLGGPSGSAALKAAVDKAVASGVVVVAAAGNEGTSGSSSTVGYPGKYPSVIAVGAVDSSNQRASFSSVGPELDVMAPGVSIQSTLPGNKYGALNGTSMASPHVAGAAALILSKHPNWTNTQVRSSLENTTTKLGDSFYYGKGLINVQAAAQ

SEQ ID NO: 70693 - protein, 275 aa, Bacillus subtilis
AQSVPYGVSQIKAPALHSQGYTGSNVKVAVIDSGIDSSHPDLKVAGGASMVPSETNPFQDNNSHGTHVAGTVAALNNSIGVLGVAPSASLYAVKVLGADGSGQYSWIINGIEWAIANNMDVINMSLGGASGSAALKAAVDKAVASGVVVVAAAGNEGTSGSSSTVGYPGKYPSVIAVGAVDSSNQRASFSSVGPELDVMAPGVSIQSTLPGNKYGAYNGTSMASPHVAGAAALILSKHPNWTNTQVRSSLENTTTKLGDSFYYGKGLINVQAAAQ

SEQ ID NO: 70694 - protein, 275 aa, Bacillus amyloliquefaciens
AQSVPYGVSQIKAPALHSQGYTGSNVKVAVIDSGIDSSHPDLKVAGGASMVPSETNPFQDNNSHGTHVAGTVAALNNSIGVLGVAPSASLYAVKVLRGVGSGQYSWIINGIEWAIANNMDVINMSLGGPSGSAALKAAVDKAVASGVVVVAAAGNEGTSGSSSTVGYPGKYPSVIAVGAVDSSNQRASFSSVGPELDVMAPGVSIQSTLPGNKYGALNGTSMASPHVAGAAALILSKHPNWTNTQVRSSLENTTTKLGDSFYYGKGLINVQAAAQ

SEQ ID NO: 70695 - protein, 275 aa, Bacillus sp.
AQTVPWGIPHIKADKAHAAGVTGSGVKVAILDTGIDANHADLNVKGGASFVTGEPNALQDGNGHGTHVAGTVAALDNTTGVLGVAYNADLYAVKVLSASGSGTLSGIAQGIEWSISNRMNVINMSLGVMHGSTALQQACNNAYNRGIVVIAAAGNSGSSGNRNTMDYPARYSSVIAVGAVSSNNTRASFSSVGSELEVMAPGVNILSTTPGNNYASRNGTSMAAPHVAGAAALIKAKYPSMTNVQIRERLKNTATNLGDPFFYGKGVINVEKALQ

SEQ ID NO: 70696 - protein, 275 aa, Bacillus amyloliquefaciens
AQSVPYGVSQIKAPALHSQGYTGGNVKVAVIDSGIDSSHPDLKVAGGASMVPGETNPFQDNNSHGTHVAGTVAALNNNIGVLGVAPSTSLYAVKVLGADGNGQYSWIIGGIEWAITNNMDVINMSLGAPSGSAALKAAVDKAVASGVVVVAAAGNEGSSGSSSTVGYPGKYPSVIAVGAVDSSNQRASFSSVGPELDVMAPGVSIQSTLPGNKYGAQNGTSMASPHVAGAAALILSKHPNWTVTQVRSSLENTTTRLGDSFYYGKGLINVQAAAQ

SEQ ID NO: 70697 - protein, 275 aa, Bacillus amyloliquefaciens
AQSVPYGVSQIKAPALHSQGYTGSNVKVAVIDSGIDSSHPDLKVAGGASMVPSETNPFQDNNGHGTHVAGTVAALNNSIGVLGVAPSASLYAVKVLGADGSGQYSWIINGIEWAIANNMDVINMSLGGPSGSAALKAAVDKAVASGVVVVAAAGNEGTSGSSSTVGYPGKYPSVIAVGAVDSSNQRASFSSVGPELDVMAPGVSIQSTLPGNKYGAYNGTSMASPHVAGAAALILSKHPNWTNTQVRSSLENTTTRLGDSFYYGKGLINVQAAAQ

SEQ ID NO: 70698 - protein, 275 aa, Bacillus amyloliquefaciens
AQSVPYGVSQIKAPALHSQGYTGSNVKVAVIDSGIDSSHPDLKVAGGASMVPSETNPFQDGNSHGTHVAGTVAALNNSIGVLGVAPSASLYAVKVLGADGSGQYSWIIGGIEWAIANNMDVINMSLGGPSGSAALKAAVDKAVASGVVVVAAAGNEGTSGSSSTVGYPGKYPSVIAVGAVDSSNQRASFSSVGPELDVMAPGVSIQSTLPGNKYGAYNGTSMASPHVAGAAALILSKHPNWTVTQVRSSLENTTTKLGDSFYYGKGLINVQAAAQ

SEQ ID NO: 70699 - protein, 275 aa, Bacillus amyloliquefaciens
AQSVPYGVSQIKAPALHSQGYTGSNVKVAVIDSGIDSSHPDLKVAGGASMVPSESXAFQDNNSHGTHVAGTVAALNNSIGVLGVAPSASLYAVKVLGADGSGQYSWIINGIEWAIANNMDVINMSLGGPSGSAALKAAVDKAVASGVVVVAAAGNEGTSGSSSTVGYPGKYPSVIAVGAVDSSNQRASFSSVGPELDVMAPGVSIQSTLPGNKYGALNGTSMASPHVAGAAALILSKHPNWTNTQVRSSLENTTTKLGDSFYYGKGLINVQAAAQ

SEQ ID NO: 70700 - protein, 275 aa, Bacillus amyloliquefaciens
AQSVPYGVSQIKAPALHSQGYTGSNVKVAVIDSGIDSSHPDLKVAGGASMVPSETNPFQDNNSHGTHVAGTVAALNNSIGVLGVAPSASLYAVKVLNGVGFGQYSWIINGIEWAIANNMDVINMSLGGPSGSAALKAAVDKAVASGVVVVAAAGNEGTSGSSSTVGYPGKYPSVIAVGAVDSSNQRASFSSVGPELDVMAPGVSIQSTLPGNKYGALNGTSMASPHVAGAAALILSKHPNWTNTQVRSSLENTTTKLGDSFYYGKGLINVQAAAQ

SEQ ID NO: 70701 - protein, 275 aa, Bacillus amyloliquefaciens
AQSVPYGVSQIKAPALHSQGYTGSNVKVAVIDSGIDSSHPDLKVAGGASMVPSETNPFQDNNSHGTHVAGTVAALNNSIGVLGVAPSASLYAVKVLYHNGSGQYSWIINGIEWAIANNMDVINMSLGGPSGSAALKAAVDKAVASGVVVVAAAGNEGTSGSSSTVGYPGKYPSVIAVGAVDSSNQRASFSSVGPELDVMAPGVSIQSTLPGNKYGALNGTSMASPHVAGAAALILSKHPNWTNTQVRSSLENTTTKLGDSFYYGKGLINVQAAAQ

SEQ ID NO: 70702 - protein, 275 aa, Bacillus amyloliquefaciens
AQSVPYGVSQIKAPALHSQGFTGSNVKVAVIDSGIDSSHPDLKVAGGASMVPSETNPFQDNNSHGTHVAGTVAALNNSIGVLGVAPSASLYAVKVLGADGSGQYSWIINGIEWAIANNMDVINMSLGGPSGSAALKAAVDKAVASGVVVVAAAGNEGTSGSSSTVGYPGKYPSVIAVGAVDSSNQRASFSSVGPELDVMAPGVSIQSTLPGNKYGAYNGTSMASPHVAGAAALILSKHPNWTNTQVRSSLENTTTKLGDSFYYGKGLINVQAAAQ

SEQ ID NO: 70703 - protein, 275 aa, Bacillus amyloliquefaciens
AQSVPYGVSQIKAPALHSQGYTGSNVKVAVIDSGIDSSHPDLKVAGGASMVPSETNPFQDNNSHGTHVAGTVAALNNSIGVLGVAPSASLYAVKVLHDNGSGQYSWIINGIEWAIANNMDVINMSLGGPSGSAALKAAVDKAVASGVVVVAAAGNEGTSGSSSTVGYPGKYPSVIAVGAVDSSNQRASFSSVGPELDVMAPGVSIQSTLPGNKYGALNGTSMASPHVAGAAALILSKHPNWTNTQVRSSLENTTTKLGDSFYYGKGLINVQAAAQ

SEQ ID NO: 70704 - protein, 275 aa, Bacillus amyloliquefaciens
AQSVPYGVSQIKAPALHSQGYTGSNVKVAVIDSGIDSSHPDLKVAGGASMVPSETNPFQDNNSHGTHVAGTVAALNNSIGVLGVAPSASLYAVKVLGADGSGQYSWIINGIEWAIANQMDVINMSLGGPSGSAALKAAVDKAVASGVVVVAAAGNEGTSGSSSTVGYPGKYPSVIAVGAVDSSNQRASFSSVGPELDVMAPGVSIQSTLPGNQYGALNGTSMASPHVAGAAALILSKHPNWTNTQVRSSLENTTTKLGDSFYYGKGLINVQAAAQ

SEQ ID NO: 70705 - protein, 275 aa, Synthetic construct
AQVVPWGIPHIKADKAHASGVTGSGVKVAVLDTGIDANHEDLNVKGGASFVSGEPNALQDGNGHGTHVAGTVAALNNTTGVLGVAYNAFLYAVKVLGASGSGTLSGIAQGIEWSIANDMDVINMSLGISTGSTALQQACNNAYASGIVVVAAAGNSGSNGKRNTMGYPARYSSVIAVGAVDSSNNRASFSSVGSELEVMAPGVSILSTTPGNNYESFSGTSMASPHVAGAAALIKAKYPSMTNVQIRNKLKNTATNLGDAFYYGHGVINVEKALQ

SEQ ID NO: 70706 - protein, 275 aa, Synthetic construct
AQVVPWGIPHIKADKAHASGVTGSGVKVAVLDTGIDANHADLNVKGGASFVSGEPNALQDGNGHGTHVAGTVAALNNTIGVLGVAYNAFLYAVKVLGASGSGTLSGIAQGIEWSIANDMDVINMSLGISTGSTALQQACNNAYASGIVVVAAAGNSGSNGKRNTMGYPARYSSVIAVGAVDSSNNRASFSSVGSELEVMAPGVSILSTTPGNNYESFNGTSMASPHVAGAAALIKAKYPSMTNVQIRNKLKNTATNLGPAFYYGHGVINVEKALQ

SEQ ID NO: 70707 - protein, 275 aa, Bacillus amyloliquefaciens
AQSVPYGVSQIKAPALHSQGYVGSNVKVAVIDSGIDSSHPDLKVAGGASMVPSETNPFQDNNSHGTHVAGTVAALNNNIGVLGVAPSASLYAVKVLGADGSGQYSWIINGIEWAIANNMDVINMSLGGPSGSAALKAAVDKAVASGVVVVAAAGNEGTSGSSSTVGYPGKYPSVIAVGAVDSSNQRASFSSVGPELDVMAPGVSIQSTLPGNNYGALNGTSMASPHVAGAAALILSKHPNWTNTQVRSSLENTTTKLGDSFYYGKGLINVQAAAQ

SEQ ID NO: 70708 - protein, 275 aa, Bacillus amyloliquefaciens
AQSVPYGVSQIKAPALHSQGYTGSNVKVAVIDSGIDSSHPDLKVAGGASMVPSETNPFQDNNSHGTHVAGTVAALNNSIGVLGVAPSASLYAVKVLGADGSGQYSWIINGIEWAIANNMDVINMSLGGPSGSAALKAAVDKAVASGVVVVAAAGNEGTSGSSSTVGYPGKYPSVIAVGAVDSSNQRASFSSVGPELDVMAPGVSIQSTLPGNKYGALNGTSMASPHVAGAAALILSKHPNWTNTQVRSSLQNTTTKLGDSFYYGKGLINVQAAAQ

SEQ ID NO: 70709 - protein, 274 aa, Bacillus amyloliquefaciens
AQSVPYGVSQIKAPALHSQGYTGSNVKVAVIDSGIDSSHPDLKVAGGASMVPSENPFQDNNSHGTHVAGTVAALNNSIGVLGVAPSASLYAVKVLGADGSGQYSWIINGIEWAIANNMDVINMSLGGPSGSAALKAAVDKAVASGVVVVAAAGNEGTSGSSSTVGYPGKYPSVIAVGAVDSSNQRASFSSVGPELDVMAPGVSIQSTLPGNKYGALNGTSMASPHVAGAAALILSKHPNWTNTQVRSSLENTTTKLGDSFYYGKGLINVQAAAQ

SEQ ID NO: 70710 - protein, 275 aa, Bacillus amyloliquefaciens
AQSVPYGVSQIKAPALHSQGYTGSNVKVAVIDSGIDSSHPDLKVAGGASMVPSETNPFQDNNSHGTHVAGTVAALNNSIGVLGVAPSTSLYAVKVLGRRGSGQYSWIINGIEWAIANNMDVINMSLGGPSGSAALKAAVDKAVASGVVVVAAAGNEGTSGSSSTVGYPGKYPSVIAVGAVDSSNQRASFSSVGPELDVMAPGVSIQSTLPGNKYGALNGTSMASPHVAGAAALILSKHPNWTNTQVRSSLENTTTKLGDSFYYGKGLINVQAAAQ

SEQ ID NO: 70711 - protein, 274 aa, Bacillus amyloliquefaciens
AQSVPYGVSQIKAPALHSQGYTGSNVKVAVIDSGIDSSHPDLKVAGGASMVPGESAFQDNNSHGTHVAGTVAALNNSIGVLGVAPSASLYAVKVLGADGSGQYSWIINAIEWAIANNMDVINMSLGGPSGSAALKAAVDKAVASGVVVVAAAGNEGTSGSSSTVGYPGKYPSVIAVGAVDSSNQRASFSSVGPELDVMAPGVSIQSTLPGNKYGALNGTSMASPHVAGAAALILSKHPNWTNTQVRSSLENTTTKLGDSFYYGKGLINVQAAAQ

SEQ ID NO: 70712 - protein, 275 aa, Bacillus sp.
AQTVPWGIPHIKADKAHAAGVTGSGVKVAILDTGIDANHADLNVKGGASFVSDEPNALQDGNGHGTHVAGTVAALNNTTGVLGVAYNADLYAVKVLSASGSGTLSGIAQGIEWSISNRMNVINMSLGGSSGSTALQQACNNAYNRGIVVIAAAGNSGSSGNRNTMDYPARYSSVIAVGAVSSNNTRASFSSVGSELEVMAPGVNILSTTPGNNYASFNGTSMAAPHVAGAAALIKAKYPSMTNVQIRERLKNTATNLGDPFFYGKGVINVEKALQ

SEQ ID NO: 70713 - protein, 275 aa, Bacillus amyloliquefaciens
AQFVPYGVSQIKAPALHSQGYTGSNVKVAVIDSGIDSSHPDLKVAGGASMVPSETNPFQDNNSHGTHVAGTVAALNNSIGVLGVAPSASLYAVKVLGADGSGQYSWIINGIEWAIANNMDVINMSLGGPSGSAALKAAVDKAVASGVVVVAAAGNEGTSGSSSTVGYPGKYPSVIAVGAVDSSNQRASFSSVGPELDVMAPGVSIQSTLPGNKYGALNGTSMASPHVAGAAALILSKHPNWTNTQVRSSLENTTTKLGDSFYYGKGLINVQAAAQ

SEQ ID NO: 70714 - protein, 275 aa, Bacillus amyloliquefaciens
AQSVPYGVSQIKAPALHSQGYTGSNVKVAVIDSGIDSSHPDLKVAGGASMVPSETNPFQDNNSHGTHVAGTVAALNNSIGVLGVAPSASLYAVKVLGSHGSGQYSWIINGIEWAIANNMDVINVSLGGPSGSAALKAAVDKAVASGVVVVAAAGNEGTSGSSSTVGYPGKYPSVIAVGAVDSSNQRASFSSVGPELDVMAPGVSIQSTLPGNKYGALNGTSMASPHVAGAAALILSKHPNWTNTQVRSSLENTTTKLGDSFYYGKGLINVQAAAQ

SEQ ID NO: 70715 - protein, 275 aa, Bacillus amyloliquefaciens
AQSVPYGVSQIKAPALHSQGYTGSNVKVAVIDSGIDSSHPDLKVAGGASMVPSETNXFQDNNSHGTHVAGTVAALNNSIGVLGVAPSASLYAVKVLGADGSGQYSWIINGIEWAIANNMDVINMSLGGPSGSAALKAAVDKAVASGVVVVAAAGNEGTSGSSSTVGYPGKYPSVIAVGAVDSSNQRASFSSVGPELDVMAPGVSIQSTLPGNKYGALNGTSMASPHVAGAAALILSKHPNWTNTQVRSSLENTTTKLGDSFYYGKGLINVQAAAQ

SEQ ID NO: 70716 - protein, 275 aa, Bacillus amyloliquefaciens
AQSVPYGVSQIKAPALHSQGYTGSNVKVAVIDSGIDSSHPDLKVAGGASMVPSETNPFQDNNSHGTHVAGTVAALNNSIGVLGVAPSASLYAVKVLGGSGSGQYSWIINGIEWAIANNMDVINMSLGGPSGSAALKAAVDKAVASGVVVVAAAGNEGTSGSSSTVGYPGKYPSVIAVGAVDSSNQRASFSSVGPELDVMAPGVSIQSTLPGNKYGALNGTSMASPHVAGAAALILSKHPNWTNTQVRSSLENTTTKLGDSFYYGKGMINVQAAAQ

SEQ ID NO: 70717 - protein, 275 aa, Synthetic construct
AQVVPWGIPHIKADKAHASGVTGSGVKVAVLDTGIDANHADLNVKGGASFVSGEPNALQDGNGHGTHVAGTVAALNNNTGVLGVAYNAFLYAVKVLGASGSGTLSGIAQGIEWSIANDMDVINMSLGSSTGSTALQQACNNAYASGIVVVAAAGNSGSNGKRNTMGYPARYSSVIAVGAVDSSNNRASFSSVGSELEVMAPGVSILSTTPGNNYESFNGTSMASPHVAGAAALIKAKYPSMTNVQIRNKLKNTATNLGDAFYYGHGVINVEKALQ

SEQ ID NO: 70718 - protein, 275 aa, Bacillus amyloliquefaciens
AQSVPYGVSQIKAPALHSQGYTGSNVKVAVIDSGIDSSHPDLKVAGGASMVPSETNPFQDNNSHGTHVAGTVAALNNSIGVLGVAPSASLYAVKVLSCLGSGQYSWIINGIEWAIANNMDVINMSLGGPSGSAALKAAVDKAVASGVVVVAAAGNEGTSGSSSTVGYPGKYPSVIAVGAVDSSNQRASFSSVGPELDVMAPGVSIQSTLPGNKYGALNGTSMASPHVAGAAALILSKHPNWTNTQVRSSLENTTTKLGDSFYYGKGLINVQAAAQ

SEQ ID NO: 70719 - protein, 275 aa, Bacillus amyloliquefaciens
AQSVPYGVSQIKAPALHSQGYTGSNVKVAVIDSGIDSSHPDLKVAGGASMVPGESXAFQDNNSHGTHVAGTVAALNNSIGVLGVAPSASLYAVKVLGADGSGQYSWIINAIEWAIANNMDVINMSLGGPSGSAALKAAVDKAVASGVVVVAAAGNEGTSGSSSTVGYPGKYPSVIAVGAVDSSNQRASFSSVGPELDVMAPGVSIQSTLPGNKYGALNGTSMASPHVAGAAALILSKHPNWTNTQVRSSLENTTTKLGDSFYYGKGLINVQAAAQ

SEQ ID NO: 70720 - protein, 275 aa, Bacillus amyloliquefaciens
AQSVPYGVSQIKAPALHSQGYTGSNVKVAVIDSGIDSSHPDLKVAGGASMVPSETNPFQDNNSHGTHVAGTVAALNNSIGVLGVAPSASLYAVKVLCSHGSGQYSWIINGIEWAIANNMDVINMSLGGPSGSAALKAAVDKAVASGVVVVVAAGNEGTSGSSSTVGYPGKYPSVIAVGAVDSSNQRASFSSVGPELDVMAPGVSIQSTLPGNKYGALNGTSMASPHVAGAAALILSKHPNWTNTQVRSSLENTTTKLGDSFYYGKGLINVQAAAQ

SEQ ID NO: 70721 - protein, 275 aa, Bacillus amyloliquefaciens
AQSVPYGVSQIKAPALHSQGYTGSNVKVAVIDSGIDSSHPDLKVAGGASMVPSETNPFQDNNSHGTHVAGTVAALNNSIGVLGVAPSASLYAVKVLSCDGSGQYSWIINGIEWAIANNMDVINMSLGGPSGSAALKAAVDKAVASGVVVVAAAGNEGTSGSSSTVGYPGKYPSVIAVGAVDSSNQRASFSSVGPELDVMAPGVSIQSTLPGNKYGALNGTSMASPHVAGAAALILSKHPNWTNTQVRSSLENTTTKLGDSFYYGKGLINVQAAAQ

SEQ ID NO: 70722 - protein, 275 aa, Bacillus amyloliquefaciens
AQSVPYGVSQIKAPALHSQGYTGSNVKVAVIDSGIDSSHPDLKVAGGASMVPSETNPFQDNNSHGTHVAGTVAALNNSIGVLGVAPSASLYAVKVLSCGGSGQYSWIINGIEWAIANNMDVINMSLGGPSGSAALKAAVDKAVASGVVVVAAAGNEGTSGSSSTVGYPGKYPSVIAVGAVDSSNQRASFSSVGPELDVMAPGVSIQSTLPGNKYGALNGTSMASPHVAGAAALILSKHPNWTNTQVRSSLENTTTKLGDSFYYGKGLINVQAAAQ

SEQ ID NO: 70723 - protein, 275 aa, Bacillus amyloliquefaciens
AQSVPYGVSQIKAPALHSQGYTGSNVKVAVIDSGIDSSHPDLKVAGGASMVPSETNPFQDNNSHGTHVAGTVAALNNSIGVLGVAPSASLYAVKVLGADGRGSYSWIINGIEWAIANNMDVINMSLGGPSGSAALKAAVDKAVASGVVVVAAAGNEGTSGSSSTVGYPGKYPSVIAVGAVDSSNQRASFSSVGPELDVMAPGVSIQSTLPGNKYGALNGTSMASPHVAGAAALILSKHPNWTNTQVRSSLENTTTKLGDSFYYGKGLINVQAAAQ

SEQ ID NO: 70724 - protein, 275 aa, Synthetic construct
AQVVPWGIPHIKADKAHASGVTGSGVKVAVLDTGIDANHEDLNVKGGASFVSGEPNALQDGNGHGTHVAGTVAALNNTTGVLGVAYNAFLYAVKVLGASGSGTLSGIAQGIEWSIANDMDVINISLGISTGSTALQQACNNAYASGIVVVAAAGNSGSNGKRNTMGYPARYSSVIAVGAVDSSNNRASFSSVGSELEVMAPGVSILSTTPGNNYESFNGTSMASPHVAGAAALIKAKYPSMTNVQIRNKLKNTATNLGDAFYYGHGVINVEKALQ

SEQ ID NO: 70725 - protein, 275 aa, Bacillus sp.
AQTVPWGIPHIKADKAHAAGVTGSGVKVAILDTGIDANHADLNVKGGASFVSGEPNALQDGNGHGTHVAGTVAALDNSIGVLGVAPSVSLYAVKVLGASGSGSVSSIAQGLEWAGNNGMHVANLSLGSPSPSATLEQAVNSATSRGVLVVAAAGNSGTSGNRNTMDYPARYSSVIAVGAVSSNNTRASFSSVGSELEVMAPGVNILSTTPGNNYASLNGTSMAAPHVAGAAALIKAKYPSMTNVQIRNRLKNTATNLGDPFFYGKGVINVESALQ

SEQ ID NO: 70726 - protein, 275 aa, Bacillus amyloliquefaciens
AQSVPYGVSQIKAPALHSQGYTGSNVKVAVIDSGIDSSHPDLKVAGGASMVPSETNPFQDNNSHGTHVAGTVAALNNSIGVLGVAPSASLYAVKVLGADGRGGYSWIINGIEWAITNNMDVINMSLGGPSGSAALKAAVDKAVASGVVVVAAAGNEGTSGSSSTVGYPGKYPSVIAVGAVDSSNQRASFSSVGPELDVMAPGVSIQSTLPGNKYGALNGTSMASPHVAGAAALILSKHPNWTNTQVRSSLENTTTKLGDSFYYGKGLINVQAAAQ

SEQ ID NO: 70727 - protein, 275 aa, Synthetic construct
AQVVPWGIPHIKADKAHASGVTGSGVKVAVLDTGIDANHADLNVKGGASFVSGEPNALQDGNGHGTHVSGTVAALNNTTGVLGVAYNAFLYAVKVLGASGSGTLSGIAQGIEWSIANDMDVINMSLGISTGSTALQQACNNAYASGIVVVAAAGNSGSNGKRNTMGYPARYSSVIAVGAVDSSNNRASFSSVGSELEVMAPGVSILSTTPGNNYESFNGTSMASPHVAGAAALIKAKYPSMTNVQIRNKLKNTATNLGDAFYYGHGVINVEKALQ

SEQ ID NO: 70728 - protein, 275 aa, Bacillus amyloliquefaciens
AQSVPYGVSQIKAPALHSQGYTGSNVKVAVIDSGIDSSHPDLKVAGGASMVPSETNPFQDNNSHGTHVAGTVAALNNSIGVLGVAPSASLYGVKVLGADGSGQYSWIINGIEWAIANNMDVINMSLGGPSGSAALKAAVDKAVASGVVVVAAAGNEGTSGSSSTVGYPGKYPSVIAVGAVDSSNQRASFSSVGPELDVMAPGVSIQSTLPGNKYGALNGTSMASPHVAGAAALILSKHPNWTNTQVRSRLENTTTKLGDSFYYGKGLINVQAAAQ

SEQ ID NO: 70729 - protein, 275 aa, Synthetic construct
AQVVPWGIPHIKADKAHASGVTGSGVKVAVLDTGIDANHADLNVKGGASFVSGEPNALQDGNGHGTHVAGTVAALNNTIGVLGVAYNAFLYAVKVLGASGSGTLSGIAQGIEWSIANDMDVINMSLGISTGSTALQQACNNAYASGIVVVAAAGNSGSNGKRNTMGYPARYSSVIAVGAVDSSNNRASFSSVGSELEVMAPGVSILSTTPGNNYESFNGTSMASPHVAGAAALIKAKYPSMTNVQIRNKLKNTATNLGDAFYYGHGVINVEKALQ

SEQ ID NO: 70730 - protein, 275 aa, Bacillus amyloliquefaciens
AQSVPYGVSQIKAPALHSQGYTGSNVKVAVIDSGIDSSHPDLKVAGGASMVPSETNPFQDNNSHGTHVAGTVAALNNSIGVLGVAPSASLYAVKVLDHVGSGQYSWIINGIEWAIANNMDVINMSLGGPSGSAALKAAVDKAVASGVVVVAAAGNEGTSGSSSTVGYPGKYPSVIAVGAVDSSNQRASFSSVGPELDVMAPGVSIQSTLPGNKYGALNGTSMASPHVAGAAALILSKHPNWTNTQVRSSLENTTTKLGDSFYYGKGLINVQAAAQ

SEQ ID NO: 70731 - protein, 275 aa, Bacillus amyloliquefaciens
AQSVPYGVSQIKAPALHSQGYTGSNVKVAVIDSGIDSSHPDLKVAGGASMVPSETXPFQDNNSHGTHVAGTVAALNNSIGVLGVAPSASLYAVKVLGADGSGQYSWIINGIEWAIANNMDVINMSLGGPSGSAALKAAVDKAVASGVVVVAAAGNEGTSGSSSTVGYPGKYPSVIAVGAVDSSNQRASFSSVGPELDVMAPGVSIQSTLPGNKYGALNGTSMASPHVAGAAALILSKHPNWTNTQVRSSLENTTTKLGDSFYYGKGLINVQAAAQ

SEQ ID NO: 70732 - protein, 275 aa, Bacillus amyloliquefaciens
AQSVPYGVSQIKAPALHSQGYTGSNVKVAVIDSGIDSSHPDLKVAGGASMVPSETNPFQDNNSHGTHVAGTVAALDNSIGVLGVAPSVSLYAVKVLGADGSGQYSWIINGIEWAIANNMDVINMSLGGPSGSAALKAAVDKAVASGVVVVAAAGNEGTSGSSSTVGYPGKYPSVIAVGAVDSSNQRASFSSVGPELDVMAPGVDIQSTLPGGKYGAYNGTSMASPHVAGAAALILSKHPNWTNTQVRSSLENTTTKLGDSFYYGKGLINVQAAAQ

SEQ ID NO: 70733 - protein, 275 aa, Bacillus sp.
AQTVPWGIPHIKADKAHAAGVTGSGVKVAILDTGIDATHADLNVKGGASFVSGEPNALQDGNGHGTHVAGTVAALNNTTGVLGVAYNADLYAVKVLSASGSGTLSGIAQGIEWSISNGMNVINMSLGGSSGSTALQQACNNAYNRGIVVIAAAGNHGSSGNRNTMYYPARYSSVIAVGAVSSNNTRASFSSVGSELEVMAPGVNILSTTPGNNYASFNGTSLAAPHVAGAAALIKAKYPSMTNVQIRERLKNTATNLGDPFFYGKGVINVESALQ

SEQ ID NO: 70734 - protein, 275 aa, Bacillus amyloliquefaciens
AQSVPYGVSQIKAPALHSQGYTGSNVKVAVIDSGIDSSHPDLKVAGGASMVPSETNPFQDNNSHGTHVAGTVAALNNSIGVLGVAPSASLYAVKVLGADGCGSYSWIINGIEWAIANNMDVINMSLGGPSGSAALKAAVDKAVASGVVVVAAAGNEGTSGSSSTVGYPGKYPSVIAVGAVDSSNQRASFSSVGPELDVMAPGVSIQSTLPGNKYGALNGTSMASPHVAGAAALILSKHPNWTNTQVRSSLENTTTKLGDSFYYGKGLINVQAAAQ

SEQ ID NO: 70735 - protein, 275 aa, Bacillus amyloliquefaciens
AQSVPYGVSQIKAPALHSQGYTGSNVKVAVIDSGIDSSHPDLKVAGGASMVPSETNPFQDNNSHGTHVAGTVAALNNSIGVLGVAPSASLYAVKVLDCDGSGQYSWIINGIEWAIANNMDVINMSLGGPSGSAALKAAVDKAVASGVVVVAAAGNEGTSGSSSTVGYPGKYPSVIAVGAVDSSNQRASFSSVGPELDVMAPGVSIQSTLPGNKYGALNGTSMASPHVAGAAALILSKHPNWTNTQVRSSLENTTTKLGDSFYYGKGLINVQAAAQ

SEQ ID NO: 70736 - protein, 275 aa, Synthetic construct
AQVVPWGIPHIKADKAHASGVTGSGVKVAVLDTGIDANHEDLNVKGGASFVSGEPNALQDGNGHGTHVAGTVAALNNNTGVLGVAYNAFLYAVKVLGASGSGTLSGIAQGIEWSIANDMDVINMSLGISTGSTALQQACNNAYASGIVVVAAAGNSGSNGKRNTMGYPARYSSVIAVGAVDSSNNRASFSSVGSELEVMAPGVSILSTTPGNNYESFNGTSMASPHVAGAAALIKAKYPSMTNVQIRNKLKNTATNLGDAFYYGHGVINVEKALQ

SEQ ID NO: 70737 - protein, 275 aa, Bacillus amyloliquefaciens
AQSVPYGVSQIKAPALHSQGYTGSNVKVAVIDSGIDSSHPDLKVAGGASIVPSETNPFQDNNSHGTHVAGTVAALNNSIGVLGVAPSASLYAVKVLGGDGSGQYSWIINGIEWAIANNMDVINMSLGGPSGSAALKAAVDKAVASGVVVVAAAGNEGTSGSSSTVGYPGKYPSVIAVGAVDSSNQRASFSSVGPELDVMAPGVSIQSTLPGNKYGALNGTSMASPHVAGAAALILSKHPNWTNTQVRSSLENTTTKLGDSFYYGKGLINVQAAAQ

SEQ ID NO: 70738 - protein, 275 aa, Bacillus amyloliquefaciens
AQSVPYGVSQIKAPALHSQGYTGSNVKVAVIDSGIDSSHPDLKVAGGASMVPSETNPFQDNNSHGTHVAGTVAALNNSIGVLGVAPSASLYAVKVLGADGSGQYSWIIRGIEWAIANNMDVINMSLGGPSGSAALKAAVDKAVASGVVVVAAAGNEGTSGSSSTVGYPGKYPSVIAVGAVDSSNQRASFSSVGPELDVMAPGVSIQSTLPGNKYGALNGTSMASPHVAGAAALILSKHPNWTNTQVRRSLENTTTKLGDSFYYGKGLINVQAAAQ

SEQ ID NO: 70739 - protein, 275 aa, Bacillus amyloliquefaciens
AQSVPYGVSQIKAPALHSQGYTGSNVKVAVIDSGIDSSHPDLKVAGGASMVPSETNPFQDNNSHGTHVAGTVAALNNSIGVLGVAPSASLYAVKVLHGDGSGQYSWIINGIEWAIANNMDVINMSLGGPSGSAALKAAVDKAVASGVVVVAAAGNEGTSGSSSTVGYPGKYPSVIAVGAVDSSNQRASFSSVGPELDVMAPGVSIQSTLPGNKYGALNGTSMASPHVAGAAALILSKHPNWTNTQVRSSLENTTTKLGDSFYYGKGLINVQAAAQ

SEQ ID NO: 70740 - protein, 275 aa, Bacillus sp.
AQTVPWGIPHIKADKAHAAGVTGSGVKVAILDTGIDANHADLNVKGGASFVSGEPNALQDGNGHGTHVAGTVAALNNTTGVLGVAYNADLYAVKVLSASGSGTLSGIAQGIEWSISNGMNVIDMSLGGSSGSTALQQACNNAYNRGIVVIAAAGNSGSDGNRNTMGYPARYSSVIAVGAVSSNNTRASFSSVGSELEVMAPGVNILSTFPGNNYASFNGTSLAAPHVAGAAALIKAKYPSMTNVQIRERLKNTATNLGDPFFYGKGNINVESALQ

SEQ ID NO: 70741 - protein, 275 aa, Bacillus amyloliquefaciens
AQSVPYGVSQIKAPALHSQGYTGSNVKVAVIDSGIDSSHPDLKVAGGASMVPSETNPFQDNNGHGTHVAGTVAALNNSIGVLGVAPSASLYAVKVLGADGSGQYSWIINGIEWAIANNMDVINMSLGGPSGSAALKAAVDKAVASGVVVVAAAGNEGTSGSSSTVGYPGKYPSVIAVGAVDSSNQRASFSSVGPELDVMAPGVSIQSTWPGNKYAALNGTSMASPHVAGAAALILSKHPNWTNTQVRSSLENTTTKLGDSWEYGKGLINVQAAAQ

SEQ ID NO: 70742 - protein, 275 aa, Bacillus amyloliquefaciens
AQSVPYGVSQIKAPALHSQGYTGSNVKVAVIDSGIDSSHPDLKVAGGASMVPSETNPFQDNNSHGTHVAGTVAALNNSIGVLGVAPSASLYAVKVLGADGSGQYSWIINGIEWAIANNMDVINMSLGGPSGSAALKAAVDKAVASGVVVVAAAGNEGTSGSSSTVGYPGKYPSVIAVGAVDSSNQRASFSSVGPELDVMAPGVSIQSTYPGNKYGAYNGTSMASPHVAGAAALILSKHPNWTNTQVRSSLENTTTKLGDSFYYGKGLINVQAAAQ

SEQ ID NO: 70743 - protein, 275 aa, Synthetic construct
AQVVPWGIPHIKADKAHASGVTGSGVKVAVLDTGIDANHADLNVKGGASFVSGEPNALQDGNGHGTHVAGTVAALNNNTGVLGVAYNAFLYAVKVLGASGSGTLSGIAQGIEWSIANDMDVINMSLGISTGSTALQQACNNAYASGIVVVAAAGNSGSNGKRNTMGYPARYSSVIAVGAVDSSNNRASFSSVGSELEVMAPGVSILSTTPGNNYESFNGTSMASPHVAGAAALIKAKYPSMTNVQIRNKLKNTATNLGPAFYYGHGVINVEKALQ

SEQ ID NO: 70744 - protein, 275 aa, Bacillus amyloliquefaciens
AQSVPYGVSQIKAPALHSQGYTGSNVKVAVIDSGIDSSHPDLKVAGGASMVPSETNPFQDNNSHGTHVAGTVAALNNSIGVLGVAPSTSLYAVKVLGADGSGQYSWIINGIEWAIANNMDVINMSLGGPSGSAALKAAVDKAVASGVVVVAAAGNEGTSGSSSTVGYPGKYPSVIAVGAVDSSNQRASFSSVGPELDVMAPGVSIQSTLPGNKYGALNGTSMASPHVAGAAALILSKHPNWTNTQVRSSLENTTTKLGDSFYYGKGLINVQAAAQ

SEQ ID NO: 70745 - protein, 275 aa, Bacillus amyloliquefaciens
AQSVPYGVSQIKAPALHSQGYTGSNVKVAVIDSGIDSSHPDLKVAGGASMVPSETNPFQDNNSHGTHVAGTVAALNNSIGVLGVAPSASLYAVKVLGADGSGRYSWIINGIEWAIANNMDVINMSLGGPSGSAALKAAVDKAVASGVVVVAAAGNEGTSGSSSTVGYPGKYPSVIAVGAVDSSNQRASFSSVGPELDVMAPGVSIQSTLPGNKYGALNGTSMASPHVAGAAALILSKHPNWTNTQVRSSLENTTTKLGDSFYYGKGLINVQAAAQ

SEQ ID NO: 70746 - protein, 275 aa, Bacillus sp.
AQTVPWGIPHIKADKAHAAGVTGSGVKVAILDTGIDANHADLNVKGGASFVSGEPNALQDGNGHGTHVAGTVAALNNTTGVLGVAYNADLYAVKVLSASGSGTLSGIAQGIEWSISNGMNVINMSLGDRIGSTALQQACNNAYNRGIVVIAAAGNSGSSGNRNTMHYPARYSSVIAVGAVSSNNTRASFSSVGSELEVMAPGVNILSTTPGNNYASRNGTSMAAPHVAGAAALIKAKYPSMTNVQIRERLKNTATNLGDPFFYGKGVINVEKALQ

SEQ ID NO: 70747 - protein, 275 aa, Bacillus amyloliquefaciens
AQSVPYGVSQIKAPALHSQGYTGSNVKVAVIDSGIDSSHPDLKVAGGASMVPSETNPFQDNNSHGTHVAGTVAALNNSIGVLGVAPSASLYAVKVLGNDGSGQYSWIINGIEWAIANNMDVINMSLGGPSGSAALKAAVDKAVASGVVVVAAAGNEGTSGSSSTVGYPGKYPSVIAVGAVDSSNQRASFSSVGPELDVMAPGVSIQSTLPGNKYGALNGTSMASPHVAGAAALILSKHPNWTNTQVRSSLENTTTKLGDSFYYGKGLINVQAAAQ

SEQ ID NO: 70748 - protein, 275 aa, Bacillus amyloliquefaciens
AQSVPYGVSQIKAPALHSQGYTGSNVKVAVIDSGIDSSHPDLKVAGGASMVPGESXAFQDNNSHGTHVAGTVAALNNSIGVLGVAPSASLYAVKVLGADGNGQYSWIINGIEWAIANNMDVINMSLGGPSGSAALKAAVDKAVASGVVVVAAAGNEGTSGSSSTVGYPGKYPSVIAVGAVDSSNQRASFSSVGPELDVMAPGVSIQSTLPGNKYGALNGTSMASPHVAGAAALILSKHPNWTNTQVRSSLENTTTKLGDSFYYGKGLINVQAAAQ

SEQ ID NO: 70749 - protein, 275 aa, Bacillus amyloliquefaciens
AQSVPYGVSQIKAPALHSQGYTGSNVKVAVIDSGIDSSHPDLKVAGGASMVPSETNPFQDNNSHGTHVAGTVAALNNSIGVLGVAPSASLYAVKVLGLGGSGQYSWIINGIEWAIANNMDVINMSLGGPSGSAALKAAVDKAVASGVVVVAAAGNEGTSGSSSTVGYPGKYPSVIAVGAVDSSNQRASFSSVGPELDVMAPGVSIQSTLPGNKYGALNGTSMASPHVAGAAALILSKHPNWTNTQVRSSLENTTTKLGDSFYYGKGLINVQAAAQ

SEQ ID NO: 70750 - protein, 275 aa, Bacillus amyloliquefaciens
AQSVPYGVSQIKAPALHSQGYTGSNVKVAVIDSGIDSSHPDLKVAGGASMVPSETNPFQDNNSHGTHVAGTVAALNNSIGVLGVAPSASLYAVKVLRRCGSGQYSWIINGIEWAIANNMDVINMSLGGPSGSAALKAAVDKAVASGVVVVAAAGNEGTSGSSSTVGYPGKYPSVIAVGAVDSSNQRASFSSVGPELDVMAPGVSIQSTLPGNKYGALNGTSMASPHVAGAAALILSKHPNWTNTQVRSSLENTTTKLGDSFYYGKGLINVQAAAQ

SEQ ID NO: 70751 - protein, 275 aa, Bacillus amyloliquefaciens
AQSVPYGVSQIKAPALHSQGYTGSNVKVAVIDSGIDSSHPDLKVAGGASMVPSETNPFQDNNSHGTHVAGTVAALNNSIGVLGVAPSASLYAVKVLSHGGSGQYSWIINGIEWAIANNMDVINMSLGGPSGSAALKAAVDKAVASGVVVVAAAGNEGTSGSSSTVGYPGKYPSVIAVGAVDSSNQRASFSSVGPELDVMAPGVSIQSTLPGNKYGALNGTSMASPHVAGAAALILSKHPNWTNTQVRSSLENTTTKLGDSFYYGKGLINVQAAAQ

SEQ ID NO: 70752 - protein, 275 aa, Bacillus amyloliquefaciens
AQSVPYGVSQIKAPALHSQGYTGSNVKVAVIDSGIDSSHPDLKVAGGASMVPSETNPFQDNNSHGTHVAGTVAALNNSIGVLGVAPSASLYAVKVLGADGSGQYSWIINGIEWAIANNMDVINMSLGGPSGSAALKAAVDKAVASGVVVVAAAGNEGTSGSSSTVGYPGKYPSVIAVGAVDSSNQRASFSSVGPELDVMAPGVSIQSTLPGNKYGALNGTSMASPHVAGAAALILSKHPNWTNTQVRDSLENTTTKLGDSFYYGKGLINVQAAAQ

SEQ ID NO: 70753 - protein, 275 aa, Bacillus amyloliquefaciens
AQSVPYGVSQIKAPALHSQGYTGQNVKVAVIDSGIDSSHPDLKVAGGASMVPSETNPFQDNNSHGTHVAGTVAALDNNIGVLGVAPSASLYAVKVLGADGSGQYSWIINGIEWAIANNMDVINMSLGGPSGSAALKAAVDKAVASGVVVVAAAGNEGTSGSSSTVGYPGKYPSVIAVGAVDSSNQRASFSSVGPELDVMAPGVSIQSTLPGNKYGAYNGTSMASPHVAGAAALILSKHPNWTNTQVRSSLENTTTKLGDSFYYGKGLINVQAAAQ

SEQ ID NO: 70754 - protein, 275 aa, Bacillus sp.
AQTVPWGIPHIKADKAHAAGVTGSGVKVAILDTGIDANHADLNVKGGASFVTYEPNALQDGNGHGTHVAGTVAALNNTTGVLGVAYNADLYAVKVLSASGSGTLSGIAQGIEWSISNGMNVINMSLGVMHGSTALQQACNNAYNRGIVVIAAAGNSGSSGNRNTMDYPARYSSVIAVGAVSSNNTRASFSSVGSELEVMAPGVNILSTTPGNNYASFNGTSMAAPHVAGAAALIKAKYPSMTNVQIRNRLKNTATNLGDPFFYGKGVINVEKALQ

SEQ ID NO: 70755 - protein, 275 aa, Bacillus amyloliquefaciens
AQSVPYGVSQIKAPALHSQGYTGSNVKVAVIDSGIDSSHPDLKVAGGASMVPSETNPFQDNNSHGTHVAGTVAALNNSIGVLGVAPSASLYAVKVLHGGGSGQYSWIINGIEWAIANNMDVINMSLGGPSGSAALKAAVDKAVASGVVVVAAAGNEGTSGSSSTVGYPGKYPSVIAVGAVDSSNQRASFSSVGPELDVMAPGVSIQSTLPGNKYGALNGTSMASPHVAGAAALILSKHPNWTNTQVRSSLENTTTKLGDSFYYGKGLINVQAAAQ

SEQ ID NO: 70756 - protein, 275 aa, Bacillus amyloliquefaciens
AQSVPYGVSQIKAPALHSQGYTGSNVKVAVIDSGIDSSHPDLKVAGGASMVPSETNPFQDNNSHGTHVAGTVAALNNSIGVLGVAPSASLYAVKVLRVGGSGQYSWIINGIEWAIANNMDVINMSLGGPSGSAALKAAVDKAVASGVVVVAAAGNEGTSGSSSTVGYPGKYPSVIAVGAVDSSNQRASFSSVGPELDVMAPGVSIQSTLPGNKYGALNGTSMASPHVAGAAALILSKHPNWTNTQVRSSLENTTTKLGDSFYYGKGLINVQAAAQ

SEQ ID NO: 70757 - protein, 275 aa, Bacillus amyloliquefaciens
AQSVPYGVSQIKAPALHSQGYTGSNVKVAVIDSGIDSSHPDLKVAGGASMVPSETNPFQDNNSHGTHVAGTVAALNNSIGVLGVAPSASLYAVKVLGCGGSGQYSWIINGIEWAIANNMDVINMSLGGPSGSAALKAAVDKAVASGVVVVAAAGNEGTSGSSSTVGYPGKYPSVIAVGAVDSSNQRASFSSVGPELDVMAPGVSIQSTLPGNKYGALNGTSMASPHVAGAAALILSKHPNWTNTQVRSSLENTTTKLGDSFYYGKGLINVQAAAQ

SEQ ID NO: 70758 - protein, 275 aa, Bacillus amyloliquefaciens
AQSVPYGVSQIKAPALHSQGYTGSNVKVAVIDSGIDSSHPDLKVAGGASMVPSETNPFQDNNSHGTHVAGTVAALNNSIGVLGVAPSASLYAVKVLGADGSGQYSWIINGIEWAIANGNDVINMSLGGPSGSAALKAAVDKAVASGVVVVAAAGNEGTSGSSSTVGYPGKYPSVIAVGAVDSSNQRASFSSVGPELDVMAPGVSIQSTLPGNKYGALNGTSMASPHVAGAAALILSKHPNWTNTQVRSSLENTTTKLGDSFYYGKGLINVQAAAQ

SEQ ID NO: 70759 - protein, 275 aa, Bacillus amyloliquefaciens
AQSVPYGVSQIKAPALHSQGYTGSNVKVAVIDSGIDSSHPDLKVAGGASMVPSETNPFQDNNSHGTHVAGTVAALNNSIGVLGVAPSASLYAVKVLGADGRGRYSWIINGIEWAIANNMDVINMSLGGPSGSAALKAAVDKAVASGVVVVAAAGNEGTSGNSSTVGYPGKYPSVIAVGAVDSSNQRASFSSVGPELDVMAPGVSIQSTLPGNKYGALNGTSMASPHVAGAAALILSKHPNWTNTQVRSSLENTTTKLGDSFYYGKGLINVQAAAQ

SEQ ID NO: 70760 - protein, 275 aa, Bacillus amyloliquefaciens
AQSVPYGVSQIKAPALHSQGYTGSNVKVAVIDSGIDSSHPDLKVAGGASMVPSETNPFQDNNSHGTHVAGTVAALNNSIGVLGVAPSASLYAVKVLGGCGSGQYSWIINGIEWAIANNMDVINMSLGGPSGSAALKAAVDKAVASGVVVVAAAGNEGTSGSSSTVGYPGKYPSVIAVGAVDSSNQRASFSSVGPELDVMAPGVSIQSTLPGNKYGALNGTSMASPHVAGAAALILSKHPNWTNTQVRSSLENTTTKLGDSFYYGKGLINVQAAAQ

SEQ ID NO: 70761 - protein, 275 aa, Synthetic construct
AQVVPWGIPHIKADKAHASGVTGSGVKVAVLDTGIDANHEDLNVKGGASFVSGEPNALQDGNGHGTHVSGTVAALNNTTGVLGVAYNAFLYAVKVLGASGSGTLSGIAQGIEWSIANDMDVINMSLGISTGSTALQQACNNAYASGIVVVAAAGNSGSNGKRNTMGYPARYSSVIAVGAVDSSNNRASFSSVGSELEVMAPGVSILSTTPGNNYESFNGTSMASPHVAGAAALIKAKYPSMTNVQIRNKLKNTATNLGDAFYYGHGVINVEKALQ

SEQ ID NO: 70762 - protein, 275 aa, Bacillus amyloliquefaciens
AQSVPYGVSQIKAPALHSQGYTGSNVKVAVIDSGIDSSHPDLKVAGGASMVPSETNPFHDNNSHGTHVAGTVAALNNSIGVLGVAPSASLYAVKVLGASGGGQYSWIINGIEWAIANNMDVINMSLGGPSGSAALKAAVDKAVASGVVVVAAAGNEGTSGSSSTVGYPGKYPSVIAVGAVDSSNQRASFSSVGPELDVMAPGVSIQSTLPGNKYGALNGTSMASPHVAGAAALILSKHPNWTNTQVRSSLENTTTKLGDSFYYGKGLINVQAAAQ

SEQ ID NO: 70763 - protein, 274 aa, Bacillus amyloliquefaciens
AQSVPYGVSQIKAPALHSQGYTGSNVKVAVIDSGIDSSHPDLKVAGGASMVPSETPFQDNNSHGTHVAGTVAALNNSIGVLGVAPSASLYAVKVLGADGSGQYSWIINGIEWAIANNMDVINMSLGGPSGSAALKAAVDKAVASGVVVVAAAGNEGTSGSSSTVGYPGKYPSVIAVGAVDSSNQRASFSSVGPELDVMAPGVSIQSTLPGNKYGALNGTSMASPHVAGAAALILSKHPNWTNTQVRSSLENTTTKLGDSFYYGKGLINVQAAAQ

SEQ ID NO: 70764 - protein, 275 aa, Bacillus amyloliquefaciens
AQSVPYGVSQIKAPALHSQGYTGSNVKVAVIDSGIDSSHPDLKVAGGASMVPSETNPFQDNNSHGTHVAGTVAALNNSIGVLGVAPSASLYAVKVLGADGSGQYSGIINGIEWAIANNMDVINMSLGGPSGSAALKAAVDKAVASGVVVVAAAGNEGTSGSSSTVGYPGKYPSVIAVGAVDSSNQRASFSSVGPELDVMAPGVSIQSTLPGNKYGAYNGTSMASPHVAGAAALILSKHPNWTNTQVRSSLENTTTKLGDSFYYGKGLINVQAAAQ

SEQ ID NO: 70765 - protein, 275 aa, Bacillus amyloliquefaciens
AQSVPYGVSQIKAPALHSQGYTGSNVKVAVIDSGIDSSHPDLKVAGGASMVPSETNPFQDNNSHGTHVAGTVAALNNSIGVLGVAPSASLYAVKVLHRGGSGQYSWIINGIEWAIANNMDVINMSLGGPSGSAALKAAVDKAVASGVVVVAAAGNEGTSGSSSTVGYPGKYPSVIAVGAVDSSNQRASFSSVGPELDVMAPGVSIQSTLPGNKYGALNGTSMASPHVAGAAALILSKHPNWTNTQVRSSLENTTTKLGDSFYYGKGLINVQAAAQ

SEQ ID NO: 70766 - protein, 275 aa, Bacillus amyloliquefaciens
AQSVPYGVSQIKAPALHSQGYTGSNVKVAVIDSGIDSSHPDLKVAGGASMVPSETNPFQDNNSHGTHVAGTVAALNNSIGVLGVAPSASLYAVKVLGADGSGQYSWIINGIEWAIANNMDVINMSLGGPSGSAALKAAVDKAVASGVVVVAAAGNEGTSGSSSTVGYPGKYPSVIAVGAVDSSNQRASFSSVGPELDVMAPGVSILSTWPGNKYGVLNGTSMASPHVAGAAALILSKHPNWTNTQVRSSLENTTTKLGDSFYYGKGLINVQAAAQ

SEQ ID NO: 70767 - protein, 275 aa, Bacillus amyloliquefaciens
AQSVPYGVSQIKAPALHSQGYTGSNVKVAVIDSGIDSSHPDLKVAGGASMVPSETNPFQDNNSHGTHVAGTVAALNNSIGVLGVAPSASLYAVKVLGRGGSGQYSWIINGIEWAIANNMDVINMSLGGPSGSAALKAAVDKAVASGVVVVAAAGNEGTSGSSSTVGYPGKYPSVIAVGAVDSSNQRASFSSVGPELDVMAPGVSIQSTLPGNKYGALNGTSMASPHVAGAAALILSKHPNWTNTQVRSSLENTTTKLGDSFYYGKGLINVQAAAQ

SEQ ID NO: 70768 - protein, 275 aa, Bacillus sp.
AQTVPWGIPHIKADKAHAAGVTGSGVKVAILDTGIDATHADLNVKGGASFVSGEPNALQDGNGHGTHVAGTVAALNNTTGVLGVAYNADLYAVKVLSASGSGTLSGIAQGIEWSISNGMNVINMSLGGSSGSTALQQACDNAYNRGIVLIAAAGNHGSDGNRNTMYYPARYSSVIAVGAVSSNNQRASFSSVGSELEVMAPGVNILSTTPGNNYASFNGTSMAAPHVAGAAALIKAKYPSMTNVQIRERLKNTATNLGDPFFYGKGVINVEQALQ

SEQ ID NO: 70769 - protein, 275 aa, Bacillus amyloliquefaciens
AQSVPYGVSQIKAPALHSQGYTGSNVKVAVIDSGIDSSHPDLKVAGGASMVPSETNPFQDNNSHGTHVAGTVAALNNSIGVLGVAPSASLYAVKVLRHGGSGQYSWIINGIEWAIANNMDVINMSLGGPSGSAALKAAVDKAVASGVVVVAAAGNEGTSGSSSTVGYPGKYPSVIAVGAVDSSNQRASFSSVGPELDVMAPGVSIQSTLPGNKYGALNGTSMASPHVAGAAALILSKHPNWTNTQVRSSLENTTTKLGDSFYYGKGLINVQAAAQ

SEQ ID NO: 70770 - protein, 275 aa, Bacillus amyloliquefaciens
AQVVPYGVSQIKAPALHSQGYTGSNVKVAVIDSGIDSSHPDLKVAGGASMVPSETNPFQDNNSHGTHVAGTVAALDNSIGVLGVAPSASLYAVKVLGADGSGQYSWIINGIEWAIANNMDVINMSLGGPSGSAALKAAVDKAVASGVVVVAAAGNEGTSGSSSTVGYPGKYPSVIAVGAVDSSNQRASFSSVGPELDVMAPGVSIQSTLPGNKYGAYNGTSMASPHVAGAAALILSKHPNWTNTQVRSSLENTTTKLGPSFYYGKGLINVQAAAQ

SEQ ID NO: 70771 - protein, 275 aa, Bacillus sp.
AQTVPWGIPHIKADKAHAAGVTGSGVKVAILDTGIDANHADLNVKGGASFVSDEPNALQDGNGHGTHVAGTVAALNNTTGVLGVAYNADLYAVKVLSASGSGTLSGIAQGIEWSISNRMNVINMSLGGSSGSTALQQACNNAYNRGIVVIAAAGNSGSSGNRNTMDYPARYSSVIAVGAVSSNNTRASFSSVGSELEVMAPGVNILSTTPGNNYASFNGTSMAAPHVAGAAALIKAKYPSMTNVQIRERLKNTATRLGDPFFYGKGVINVEKALQ

SEQ ID NO: 70772 - protein, 275 aa, Bacillus amyloliquefaciens
AQSVPYGVSQIKAPALHSQGYTGSNVKVAVIDSGIDSSHPDLKVAGGASMVPSETNPFQDNNSHGTHVAGTVAALNNSIGVLGVAPSASLYAVKVLCRNGSGQYSWIINGIEWAIANNMDVINMSLGGPSGSAALKAAVDKAVASGVVVVAAAGNEGTSGSSSTVGYPGKYPSVIAVGAVDSSNQRASFSSVGPELDVMAPGVSIQSTLPGNKYGALNGTSMASPHVAGAAALILSKHPNWTNTQVRSSLENTTTKLGDSFYYGKGLINVQAAAQ

SEQ ID NO: 70773 - protein, 275 aa, Bacillus amyloliquefaciens
AQSVPYGVSQIKAPALHSQGYTGSNVKVAVIDSGIDSSHPDLKVAGGASMVPSETNPFQDNNSHGTHVAGTVAALNNSIGVLGVAPSASLYAVKVLDRRGSGQYSWIINGIEWAIANNMDVINMSLGGPSGSAALKAAVDKAVASGVVVVAAAGNEGTSGSSSTVGYPGKYPSVIAVGAVDSSNQRASFSSVGPELDVMAPGVSIQSTLPGNKYGALNGTSMASPHVAGAAALILSKHPNWTNTQVRSSLENTTTKLGDSFYYGKGLINVQAAAQ

SEQ ID NO: 70774 - protein, 275 aa, Bacillus amyloliquefaciens
AQSVPYGVSQIKAPALHSQGYTGSNVKVAVIDSGIDSSHPDLKVAGGASMVPSETNPFQDNNSHGTHVAGTVAALNNSIGVLGVAPSASLYAVKVLGDCGSGQYSWIINGIEWAIANNMDVINMSLGGPSGSAALKAAVDKAVASGVVVVAAAGNEGTSGSSSTVGYPGKYPSVIAVGAVDSSNQRASFSSVGPELDVMAPGVSIQSTLPGNKYGALNGTSMASPHVAGAAALILSKHPNWTNTQVRSSLENTTTKLGDSFYYGKGLINVQAAAQ

SEQ ID NO: 70775 - protein, 275 aa, Bacillus amyloliquefaciens
AQSVPYGVSQIKAPALHSQGYTGSNVKVAVIDSGIDSSHPDLKVAGGASMVPSETNPFQDNNSHGTHVAGTVAALNNSIGVLGVAPSASLYAVKVLGADGSGQYSWIINGIEWAIANNMDVINMSLGGPSGSAALKAAVDKAVASGVVVVAAAGNEGTSGSSSTVGYPGKYPSVIAVGAVDSSNQRASFSSVGPELDVMAPGVSIQSTLPGNKYGALNGTSMASPHVAGAAALILSKHPNWTNTQVRRSLENTTTKLGDSFYYGKGLINVQAAAQ

SEQ ID NO: 70776 - protein, 275 aa, Bacillus amyloliquefaciens
AQSVPYGVSQIKAPALHSQGYTGSNVKVAVIDSGIDSSHPDLKVAGGASMVPSETNPFQDNNSHGTHVAGTVAALNNSIGVLGVAPSASLYAVKVLGCSGSGQYSWIINGIEWAIANNMDVINMSLGGPSGSALLKAAVDKAVASGVVVVAAAGNEGTSGSSSTVGYPGKYPSVIAVGAVDSSNQRASFSSVGPELDVMAPGVSIQSTLPGNKYGALNGTSMASPHVAGAAALILSKHPNWTNTQVRSSLENTTTKLGDSFYYGKGLINVQAAAQ

SEQ ID NO: 70777 - protein, 275 aa, Bacillus amyloliquefaciens
AQSVPYGVSQIKAPALHSQGYTGSNVKVAVIDSGIDSSHPDLKVAGGASMVPSETNPFQDNNSHGTHVAGTVAALNNSIGVLGVAPSASLYAVKVLGADGSGQYSWIINGIEWAIANNMDVINMSLGGHSGSAALKAAVDKAVASGVVVVAAAGNEGTSGSSSTVGYPGKYPSVIAVGAVDSSNQRASFSSVGPELDVMAPGVSIQSTLPGNKYGALNGTSMASPHVAGAAALILSKHPNWTNTQVRSSLENTTTKLGDSFYYGKGLINVQAAAQ

SEQ ID NO: 70778 - protein, 275 aa, Bacillus amyloliquefaciens
AQSVPYGVSQIKAPALHSQGYTGSNVKVAVIDSGIDSSHPDLKVAGGASMVPSETNPFQDNNSHGTHVAGTVAALNNSIGVLGVAPSASLYAVKVLGGRGSGQYSWIINGIEWAIANNMDVINMSLGGPSGSAALKAAVDKAVASGVVVVAAAGNEGTSGSSSTVGYPGKYPSVIAVGAVDSSNQRASFSSVGPELDVMAPGVSIQSTLPGNKYGALNGTSMASPHVAGAAALILSKHPNWTNTQVRSSLENTTTKLGDSFYYGKGLINVQAAAQ

SEQ ID NO: 70779 - protein, 275 aa, Bacillus amyloliquefaciens
AQSVPYGVSQIKAPALHSQGYTGSNVKVAVIDSGIDSSHPDLKVAGGASMVPSETNPFQDNNSHGTHVAGTVAALNNSIGVLGVAPSASLYAVKVLRRGGSGQYSWIINGIEWAIANNMDVINMSLGGPSGSAALKAAVDKAVASGVVVVAAAGNEGTSGSSSTVGYPGKYPSVIAVGAVDSSNQRASFSSVGPELDVMAPGVSIQSTLPGNKYGALNGTSMASPHVAGAAALILSKHPNWTNTQVRSSLENTTTKLGDSFYYGKGLINVQAAAQ

SEQ ID NO: 70780 - protein, 275 aa, Bacillus amyloliquefaciens
AQSVPYGVSQIKAPALHSQGYTGSNVKVAVIDSGIDSSHPDLKVAGGASMVPSETNPFQDNNSHGTHVAGTVAALNNSIGVLGVAPSASLYAVKVLGSRGSGQYSWIINGIEWAIANNMDVINMSLGGPSGSAALKAAVDKAVASGVVVVAAAGNEGTSGSSSTVSYPGKYPSVIAVGAVDSSNQRASFSSVGPELDVMAPGVSIQSTLPGNKYGALNGTSMASPHVAGAAALILSKHPNWTNTQVRSSLENTTTKLGDSFYYGKGLINVQAAAQ

SEQ ID NO: 70781 - protein, 275 aa, Bacillus amyloliquefaciens
AQSVPYGVSQIKAPALHSQGYTGSNVKVAVIDSGIDSSHPDLKVAGGASMVPSETNPFQDNNSHGTHVAGTVAALNNSIGVLGVAPSASLYAVKVLGADGLGSYSWIINGIEWAIANNMDVINMSLGGPSGSAALKAAVDKAVASGVVVVAAAGNEGTSGSSSTVGYPGKYPSVIAVGAVDSSNQRASFSSVGPELDVMAPGVSIQSTLPGNKYGALNGTSMASPHVAGAAALILSKHPNWTNTQVRSSLENTTTKLGDSFYYGKGLINVQAAAQ

SEQ ID NO: 70782 - protein, 275 aa, Bacillus amyloliquefaciens
AQSVPYGVSQIKAPALHSQGYTGSNVKVAVIDSGIDSSHPDLKVAGGASMVPSETNPFQDNNSHGTHVAGTVAALNNSIGVLGVAPSASLYAVKVLGADGGGSYSWIINGIEWAIANNMDVINMSLGGPSGSAALKAAVDKAVASGVVVVAAAGNEGTSGSSSTVGYPGKYPSVIAVGAVDSSNQRASFSSVGPELDVMAPGVSIQSTLPGNKYGALNGTSMASPHVAGAAALILSKHPNWTNTQVRSSLENTTTKLGDSFYYGKGLINVQAAAQ

SEQ ID NO: 70783 - protein, 275 aa, Bacillus amyloliquefaciens
AQSVPYGVSQIKAPALHSQGYTGSNVKVAVIDSGIDSSHPDLKVAGGASMVPSETNPFQDNNSHGTHVAGTVAALNNSIGVLGVAPSASLYAVKVLGADGSGQYSWIINGIEWAIANNMDVINMSLGGPSGSAALKAAVDKAVASGVVVVAAAGNEGTSGSSSTVGYPGKYPSVIAVGAVDSSNQRASFSSVGPELDVMAPGVSIQSTLPGNTYGAYNGTSMASPHVAGAAALILSKHPNWTNTQVRSSLENTTTKLGDSFYYGKGLINVQAAAQ

SEQ ID NO: 70784 - protein, 275 aa, Bacillus amyloliquefaciens
AQSVPYGVSQIKATALHSQGYTGSNVKVAVIDSGIDSSHPDLKVAGGASMVPSESXAFQDNNSHGTHVAGTVAALNNSIGVLGVAPSASLYAVKVLGADGSGQYSWIINGIEWAIANNMDVINMSLGGPSGSAALKAAVDKAVASGVVVVAAAGNEGTSGSSSTVGYPGKYPSVIAVGAVDSSNQRASFSSVGPELDVMAPGVSIQSTLPGNKYGALNGTSMASPHVAGAAALILSKHPNWTNTQVRSSLENTTTKLGDSFYYGKGLINVQAAAQ

SEQ ID NO: 70785 - protein, 275 aa, Bacillus amyloliquefaciens
AQSVPYGVSQIKAPALHSQGYTGSNVKVAVIDSGIDSSHPDLKVAGGASMVPSETNPFQDNNSHGTHVAGTVAALNNSIGVLGVAPSASLYAVKVLDGGGSGQYSWIINGIEWAIANNMDVINMSLGGPSGSAALKAAVDKAVASGVVVVAAAGNEGTSGSSSTVGYPGKYPSVIAVGAVDSSNQRASFSSVGPELDVMAPGVSIQSTLPGNKYGALNGTSMASPHVAGAAALILSKHPNWTNTQVRSSLENTTTKLGDSFYYGKGLINVQAAAQ

SEQ ID NO: 70786 - protein, 275 aa, Bacillus amyloliquefaciens
AQSVPYGVSQIKAPALHSQGYTGSNVKVAVIDSGIDSSHPDLKVAGGASMVPSETNPFQDNNSHGTHVAGTVAALNNSIGVLGVAPSASLYAVKVLGADGSGQYSWIIDGIEWAIANNMDVINMSLGGPSGSAALKAAVDKAVASGVVVVAAAGNEGTSGSSSTVGYPGKYPSVIAVGAVDSSNQRASFSSVGPELDVMAPGVSIQSTLPGNKYGALNGTSMASPHVAGAAALILSKHPNWTNTQVRDSLENTTTKLGDSFYYGKGLINVQAAAQ

SEQ ID NO: 70787 - protein, 275 aa, Bacillus amyloliquefaciens
AQSVPYGVSQIKAPALHSQGYTGSNVKVAVIDSGIDSSHPDLKVAGGASMVPSETNPFQDNNSHGTHVAGTVAALNNSIGVLGVAPSASLYAVKVLCRGGSGQYSWIINGIEWAIANNMDVINMSLGGPSGSAALKAAVDKAVASGVVVVAAAGNEGTSGSSSTVGYPGKYPSVIAVGAVDSSNQRASFSSVGPELDVMAPGVSIQSTLPGNKYGALNGTSMASPHVAGAAALILSKHPNWTNTQVRSSLENTTTKLGDSFYYGKGLINVQAAAQ

SEQ ID NO: 70788 - protein, 275 aa, Bacillus amyloliquefaciens
AQSVPYGVSQIKAPALHSQGYTGSNVKVAVIDSGIDSSHPDLKVAGGASMVPSETNPFQDNNSHGTHVAGTVAALNNSIGVLGVAPSASLYAVKVLGADGSGQYSWIINGIEWAIANNMDVINMSLGGGSGSAALKAAVDKAVASGVVVVAAAGNEGTSGSSSTVGYPGKYPSVIAVGAVDSSNQRASFSSVGPELDVMAPGVSIQSTLPGNKYGALNGTSMASPHVAGAAALILSKHPNWTNTQVRSSLENTTTKLGDSFYYGKGLINVQAAAQ

SEQ ID NO: 70789 - protein, 275 aa, Bacillus sp.
AQTVPWGIPHIKADKAHAAGVTGSGVKVAILDTGIDANHADLNVKGGASFVSGEPNALQDGNGHGTHVAGTVAALDNTTGVLGVAYNADLYAVKVLSASGSGTLSGIAQGIEWSISNRMNVINMSLGVMHGSTALQQACNNAYNRGIVVIAAAGNDGSSGNRNTMDYPARYSSVIAVGAVSSNNTRASFSSVGSELEVMAPGVNILSTTPGNNYASRNGTSMAAPHVAGAAALIKAKYPSMTNVQIRNRLKNTATNLGDPFFYGKGVINVESALQ

SEQ ID NO: 70790 - protein, 275 aa, Bacillus amyloliquefaciens
AQSVPYGVSQIKAPALHSQGYTGSNVKVAVIDSGIDSSHPDLKVAGGASMVPSETNPFQDNNSHGTHVAGTVAALNNSIGVLGVAPSASLYAVKVLGCLGSGQYSWIINGIEWAIANNMDVINMSLGGPSGSAALKAAVDKAVASGVVVVAAAGNEGTSGSSSTVGYPGKYPSVIAVGAVDSSNQRASFSSVGPELDVMAPGVSIQSTLPGNRYGALNGTSMASPHVAGAAALILSKHPNWTNTQVRSSLENTTTKLGDSFYYGKGLINVQAAAQ

SEQ ID NO: 70791 - protein, 275 aa, Bacillus amyloliquefaciens
AQQVPYGVSQIKAPALHSQGYTGSNVKVAVIDSGIDSSHPDLKVAGGASMVPSETNPFQDNNSHGTHVAGTVAALNNNIGVLGVAPSASLYAVKVLGADGSGQYSWIINGIEWAIANNMDVINMSLGGPSGSAALKAAVDKAVASGVVVVAAAGNEGTSGSSSTVGYPGKYPSVIAVGAVDSSNQRASFSSVGPELDVMAPGVSIQSTLPGNKYGALNGTSMASPHVAGAAALILSKHPNWTNTQVRSSLENTTTKLGDSFYYGKGLINVQAAAQ

SEQ ID NO: 70792 - protein, 275 aa, Bacillus amyloliquefaciens
AQSVPYGVSQIKAPALHSQGYTGSNVKVAVIDSGIDSSHPDLKVAGGASMVPSETNPFQDNNSHGTHVAGTVAALNNSIGVLGVAPSASLYAVKVLGADGSGQYSWIINGIEWAIANNMDVINMSLGGRSGSAALKAAVDKAVASGVVVVAAAGNEGTSGSSSTVGYPGKYPSVIAVGAVDSSNQRASFSSVGPELDVMAPGVSIQSTLPGNKYGALNGTSMASPHVAGAAALILSKHPNWTNTQVRSSLENTTTKLGDSFYYGKGLINVQAAAQ

SEQ ID NO: 70793 - protein, 275 aa, Bacillus amyloliquefaciens
AQSVPYGVSQIKAPALHSQGYTGSNVKVAVIDSGIDSSHPDLKVAGGASMVPSETNPFQDNNGHGTHVAGTVAALNNSIGVLGVAPSASLYAVKVLGADGSGQYSWIIGGIEWAIANNMDVINMSLGGPSGSAALKAAVDKAVASGVVVVAAAGNEGTSGSSSTVGYPGKYPSVIAVGAVDSSNQRASFSSVGPELDVMAPGVSIQSTLPGNKYGAYNGTSMASPHVAGAAALILSKHPNWTNTQVRSSLENTTTKLGDSFYYGKGLINVQAAAQ

SEQ ID NO: 70794 - protein, 275 aa, Bacillus amyloliquefaciens
AQSVPYGVSQIKAPALHSQGYTGSNVKVAVIDSGIDSSHPDLKVAGGASMVPSETNPFQDNNSHGTHVAGTVAALNNSIGVLGVAPSASLYAVKVLGGLGSGQYSWIINGIEWAIANNMDVINMSLGGPSGSAALKAAVDKAVASGVVVVAAAGNEGTSGSSSTVGYPGKYPSVIAVGAVDSSNQRASFSSVGPELDVMAPGVSIQSTLPGNKYGALNGTSMASPHVAGAAALILSKHPNWTNTQVRSSLENTTTKLGDSFYYGKGLINVQAAAQ

SEQ ID NO: 70795 - protein, 275 aa, Bacillus amyloliquefaciens
AQSVPYGVSQIKAPALHSQGYTGSNVKVAVIDSGIDSSHPDLKVAGGASMVPSETNPFQDNNSHGTHVAGTVAALNNSIGVLGVAPSASLYAVKVLGSRGSGQYSWIINGIEWAIANNMDVINMSLGGPSGSAALKAAVDKAVASGVVVVAAASNEGTSGSSSTVGYPGKYPSVIAVGAVDSSNQRASFSSVGPELDVMAPGVSIQSTLPGNKYGALNGTSMASPHVAGAAALILSKHPNWTNTQVRSSLENTTTKLGDSFYYGKGLINVQAAAQ

SEQ ID NO: 70796 - protein, 275 aa, Bacillus amyloliquefaciens
AQSVPYGVSQIKAPALHSQGYTGSNVKVAVIDSGIDSSHPDLKVAGGASMVPSETNPFQDNNSHGTHVAGTVAALNNSIGVLGVAPSASLYAVKVLNGVGSGQYSWIINGIEWAIANNMDVINMSLGGPSGSAALKAAVDKAVASGVVVVVAAGNEGTSGSSSTVGYPGKYPSVIAVGAVDSSNQRASFSSVGPELDVMAPGVSIQSTLPGNKYGALNGTSMASPHVAGAAALILSKHPNWTNTQVRSSLENTTTKLGDSFYYGKGLINVQAAAQ

SEQ ID NO: 70797 - protein, 275 aa, Bacillus amyloliquefaciens
AQSVPYGVSQIKAPALHSQGYTGSNVKVAVIDSGIDSSHPDLKVAGGASMVPSETNPFQDNNSHGTHVAGTVAALNNSIGVLGVAPSASLYAVKVLGHRGSGQYSWIINGIEWAIANNMDVINMSLGGPSGSAALKAAVDKAVASGVVVVAAAGNEGTSGSSSTVGYPGKYPSVIAVGAVDSSNQRASFSSVGPELDVMAPGVSIQSTLPGNKYGALNGTSMASPHVAGAAALILSKHPNWTNTQVRSSLENTTTKLGDSFYYGKGLINVQAAAQ

SEQ ID NO: 70798 - protein, 275 aa, Bacillus amyloliquefaciens
AQSVPYGVSQIKAPALHSQGYTGSNVKVAVIDSGIDSSHPDLKVAGGASMVPSETNPFQDNNSHGTHVAGTVAALNNSIGVLGVAPSASLYAVKVLNGRGSGQYSWIINGIEWAIANNMDVINMSLGGPSGSAALKAAVDKAVASGVVVVAAAGNEGTSGSSSTVGYPGKYPSVIAVGAVDSSNQRASFSSVGPELDVMAPGVSIQSTLPGNKYGALNGTSMASPHVAGAAALILSKHPNWTNTQVRSSLENTTTKLGDSFYYGKGLINIQAAAQ

SEQ ID NO: 70799 - protein, 275 aa, Bacillus amyloliquefaciens
AQSVPYGVSQIKAPALHSQGYTGSNVKVAVIDSGIDSSHPDLKVAGGASMVPSETNPFQDNNSHGTHVAGTVAALNNSIGVLGVAPSASLYAVKVLSRYGSGQYSWIINGIEWAIANNMDVINMSLGGPSGSAALKAAVDKAVASGVVVVAAAGNEGTSGSSSTVGYPGKYPSVIAVGAVDSSNQRASFSSVGPELDVMAPGVSIQSTLPGNKYGALNGTSMASPHVAGAAALILSKHPNWTNTQVRSSLENTTTKLGDSFYYGKGLINVQAAAQ

SEQ ID NO: 70800 - protein, 275 aa, Bacillus sp.
AQTVPWGIPHIKADKAHAAGVTGSGVKVAILDTGIDANHADLNVKGGASFVTGEPNALQDGNGHGTHVAGTVAALDNTTGVLGVAYNADLYAVKVLSASGSGTLSGIAQGIEWSISNRMNVINMSLGDRIGSTALQQACNNAYNRGIVVIAAAGNSGSSGNRNTMDYPARYSSVIAVGAVSSNNTRASFSSVGSELEVMAPGVNILSTTPGNNYASRNGTSMAAPHVAGAAALIKAKYPSMTNVQIRERLKNTATRLGDPFFYGKGVINVESALQ

SEQ ID NO: 70801 - protein, 275 aa, Bacillus amyloliquefaciens
AQSVPYGVSQIKAPALHSQGYTGSNVKVAVIDSGIDSSHPDLKVAGGASMVPSETNPNQDNNSHGTHVAGTVAALNNSIGVLGVAPSASLYAVKVLGADGSGQYSWIINGIEWAIANNMDVINMSLGGPSGSAALKAAVDKAVASGVVVVAAAGNEGTSGSSSTVGYPGKYPSVIAVGAVDSSNQRASFSSVGPELDVMAPGVSIQSTLPGNKYGAYNGTSMASPHVAGAAALILSKHPNWTNTQVRSSLENTTTKLGDSFYYGKGLINVQAAAQ

SEQ ID NO: 70802 - protein, 275 aa, Bacillus amyloliquefaciens
AQSVPYGVSQIKAPALHSQGYTGSNVKVAVIDSGIDSSHPDLKVAGGASMVPSETNPFQDNNSHGTHVAGTVAALNNSIGVLGVAPSASLYAVKVLGASGGGQYSWIINGIEWAIANNMDVINMSLGGPSGSAALKAAVDKAVASGVVVVAAAGNEGTSGSSSTVGYPGKYPSVIAVGAVDSSNQRASFSSVGPELDVMAPGVSIQSTLPGNKYGALNGTSMASPHVAGAAALILSKHPNWTNTQVRSSLENTTTKLGDSFYYGKGLINVQAAAQ

SEQ ID NO: 70803 - protein, 275 aa, Bacillus sp.
AQTVPWGIPHIKADKAHAAGVTGSGVKVAILDTGIDANHADLNVKGGASFVFGEPNALQDGNGHGTHVAGTVAALDNTTGVLGVAYNADLYAVKVLSASGSGTLSGIAQGIEWSISNRMNVINMSLGDFYGSTALQQACNNAYNRGIVVIAAAGNNGSSGNRNTMDYPARYSSVIAVGAVSSNNTRASFSSVGSELEVMAPGVNILSTTPGNNYASRNGTSMAAPHVAGAAALIKAKYPSMTNVQIRNRLKNTATNLGDPFFYGKGVINVEKALQ

SEQ ID NO: 70804 - protein, 275 aa, Bacillus amyloliquefaciens
AQSVPYGVSQIKAPALHSQGYTGSNVKVAVIDSGIDSSHPDLKVAGGASMVPSETNPFQDNNSHGTHVAGTVAALNNSIGVLGVAPSASLYAVKVLGADGSGNYSWIINGIEWAIANNMDVINMSLGGPSGSAALKAAVDKAVASGVVVVAAAGNDGTSGSSSTVGYPGKYPSVIAVGAVDSSNQRASFSSVGPELDVMAPGVSIQSTLPGNKYGALNGTSMASPHVAGAAALILSKHPNWTNTQVRSSLENTTTKLGDSFYYGKGLINVQAAAQ

SEQ ID NO: 70805 - protein, 275 aa, Bacillus amyloliquefaciens
AQSVPYGVSQIKAPALHSQGYTGSNVKVAVIDSGIDSSHPDLKVAGGASMVPSETNPFQDNNSHGTHVAGTVAALNNSIGVLGVAPSASLYAVKVLGADGSGQYSWIINGIEWATANNMDVINMSLGGPSGSAALKAAVDKAVASGVVVVAAAGNEGTSGSSSTVGYPGKYPSVIAVGAVDSSNQRASFSSVGPELDVMAPGVSIQSTLPGNKYGAYNGTSMASPHVAGAAALILSKHPNWTNTQVRSSLENTTTKLGDSFYYGKGLINVQAAAQ

SEQ ID NO: 70806 - protein, 275 aa, Bacillus amyloliquefaciens
AQSVPYGVSQIKAPALHSQGYTGSNVKVAVIDSGIDSSHPDLKVAGGASMVPSETNPFQDNNSHGTHVAGTVAALNNSIGVLGVAPSASLYAVKVLRGGGSGQYSWIINGIEWAIANNMDVINMSLGGPSGSAALKAAVDKAVASGVVVVAAAGNEGTSGSSSTVGYPGKYPSVIAVGAVDSSNQRASFSSVGPELDVMAPGVSIQSTLPGNKYGALNGTSMASPHVAGAAALILSKHPNWTNTQVRSSLENTTTKLGDSFYYGKGLINVQAAAQ

SEQ ID NO: 70807 - protein, 275 aa, Bacillus amyloliquefaciens
AQSVPYGVSQIKAPALHSQGYTGSNVKVAVIDSGIDSSHPDLKVAGGASMVPSETNPFQDNNSHGTHVAGTVAALNNSIGVLGVAPSASLYAVKVLSGFGSGQYSWIINGIEWAIANNMDVINMSLGGPSGSAALKAAVDKAVASGVVVVAAAGNEGTSGSSSTVGYPGKYPSVIAVGAVDSSNQRASFSSVGPELDVMAPGVSIQSTLPGNKYGALNGTSMASPHVAGAAALILSKHPNWTNTQVRSSLENTTTKLGDSFYYGKGLINVQAAAQ

SEQ ID NO: 70808 - protein, 275 aa, Bacillus amyloliquefaciens
AQSVPYGVSQIKAPALHSQGYTGSNVKVAVIDSGIDSSHPDLKVAGGASMVPSETNPFQDNNSHGTHVAGTVAALNNSIGVLGVAPSASLYAVKVLHRDGSGQYSWIINGIEWAIANNMDVINMSLGGPSGSAALKAAVDKAVASGVVVVAAAGNEGTSGSSSTVGYPGKYPSVIAVGAVDSSNQRASFSSVGPELDVMAPGVSIQSTLPGNKYGALNGTSMASPHVAGAAALILSKHPNWTNTQVRSSLENTTTKLGDSFYYGKGLINVQAAAQ

SEQ ID NO: 70809 - protein, 275 aa, Bacillus sp.
AQTVPWGIPHIKADKAHAAGVTGSGVKVAILDTGIDATHADLNVKGGASFVSGEPNALQDGNGHGTHVAGTVAALNNTTGVLGVAYNADLYAVKVLSASGSGTLSGIAQGIEWSISNGMNVINMSLGGSSGSTALQQACNNAYNRGIVVIAAAGNHGSDGNRNTMYYPARYSSVIAVGAVSSNNTRASFSSVGSELEVMAPGVNILSTTPGNNYASFNGTSMAAPHVAGAAALIKAKYPSMTNVQIRERLKNTATNLGDPFFYGKGVINVEQALQ

SEQ ID NO: 70810 - protein, 275 aa, Bacillus amyloliquefaciens
AQSVPYGVSQIKAPALHSQGYTGSNVKVAVIDSGIDSSHPDLKVAGGASMVPSETNPFQDNNSHGTHVAGTVAALNNSIGVLGVAPSASLYAVKVLHGRGSGQYSWIINGIEWAIANNMDVINMSLGGPSGSAALKAAVDKAVASGVVVVAAAGNEGTSGSSSTVGYPGKYPSVIAVGAVDSSNQRASFSSVGPELDVMAPGVSIQSTLPGNKYGALNGTSMASPHVAGAAALILSKHPNWTNTQVRSSLENTTTKLGDSFYYGKGLINVQAAAQ

SEQ ID NO: 70811 - protein, 275 aa, Bacillus sp.
AQTVPWGIPHIKADKAHAAGVTGSGVKVAILDTGIDANHADLNVKGGASFVTGEPNALQDGNGHGTHVAGTVAALDNTTGVLGVAYNADLYAVKVLSASGSGTLSGIAQGIEWSISNRMNVINMSLGDFYGSTALQQACNNAYNRGIVVIAAAGNNGSSGNRNTMDYPARYSSVIAVGAVSSNNTRASFSSVGSELEVMAPGVNILSTTPGNNYASFNGTSMAAPHVAGAAALIKAKYPSMTNVQIRNRLKNTATELGDPFFYGKGVINVEKALQ

SEQ ID NO: 70812 - protein, 275 aa, Bacillus amyloliquefaciens
AQSVPYGVSQIKAPALHSQGYTGSNVKVAVIDSGIDSSHPDLKVAGGASMVPSETNPFQDNNSHGTHVAGTVAALNNSIGVLGVAPSASLYAVKVLGADGSGQYSWIINGIEWAIANNMDVINMSLGGPSGSAALKAAVDKAVASGVVVVAAAGNEGTSGSSSTVGYPGKYPSVIAVGAVDSSNQRASFSSVGPELDVMAPGVSIQSTLPGNKYGALNGTSMASPHVAGAAALILSKHPNWTNTQVRGSLENTTTKLGDSFYYGKGLINVQAAAQ

SEQ ID NO: 70813 - protein, 275 aa, Bacillus amyloliquefaciens
AQSVPYGVSQIKAPALHSQGYTGSNVKVAVIDSGIDSSHPDLKVAGGASMVPSETNPFQDNNSHGTHVAGTVAALNNSIGVLGVAPSASLYAVKVLGRCGSGQYSWIINGIEWAIANNMDVINMSLGGPSGSAALKAAVDKAVASGVVVVAAAGNEGTSGSSSTVGYPGKYPSVIAVGAVDSSNQRASFSSVGPELDVMAPGVSIQSTLPGNKYGALNGTSMASPHVAGAAALILSKHPNWTNTQVRSSLENTTTKLGDSFYYGKGLINVQAAAQ

SEQ ID NO: 70814 - protein, 275 aa, Bacillus amyloliquefaciens
AQSVPYGVSQIKAPALHSQGYTGSNVKVAVIDSGIDSSHPDLKVAGGASMVPSETNPFQDNNSHGTHVAGTVAALNNSIGVLGVAPSASLYAVKVLGADGHGSYSWIINGIEWAIANNMDVINMSLGGPSGSAALKAAVDKAVASGVVVVAAAGNEGTSGSSSTVGYPGKYPSVIAVGAVDSSNQRASFSSVGPELDVMAPGVSIQSTLPGNKYGALNGTSMASPHVAGAAALILSKHPNWTNTQVRSSLENTTTKLGDSFYYGKGLINVQAAAQ

SEQ ID NO: 70815 - protein, 275 aa, Bacillus amyloliquefaciens
AQSVPYGVSQIKAPALHSQGYTGSNVKVAVIDSGIDSSHPDLKVAGGASMVPSETNPFQDNNSHGTHVAGTVAALNNSIGVLGVAPSASLYAVKVLGADGSGDYSWIINGIEWAIANNMDVINMSLGGPSGSAALKAAVDKAVASGVVVVAAAGNEGTSGSSSTVGYPGKYPSVIAVGAVDSSNQRASFSSVGPELDVMAPGVSIQSTLPGNKYGALNGTSMASPHVAGAAALILSKHPNWTNTQVRSSLENTTTKLGDSFYYGKGLINVQAAAQ

SEQ ID NO: 70816 - protein, 275 aa, Bacillus amyloliquefaciens
AQSVPYGVSQIKAPALHSQGYTGSNVKVAVIDSGIDSSHPDLKVAGGASMVPSETNPFQDNNSHGTHVAGTVAALNNSIGVLGVAPSASLYAVKVLGRRGSGQYSWIINGIEWAIANNMDVINMSLGGPSGSAALKAAVDKAVASGVVVVAAAGNEGTSGSSSTVGYPGKYPSVIAVGAVDSSNQRASFSSVGPELDVMAPGVSIQSTLPGNKYGALNGTSMASPHVAGAAALILSKHPNWTNTQVRSSLENTTTKLGDSFYYGKGLINVQAAAQ

SEQ ID NO: 70817 - protein, 275 aa, Bacillus sp.
AQTVPWGIPHIKADKAHAAGVTGSGVKVAILDTGIDANHDDLNVKGGASFVSGEPNALQDGNGHGTHVAGTVAALNNTTGVLGVAYNADLYAVKVLSASGSGTLSGIAQGIEWTISNGMNVINMSLGGSSGSTALQQACNNAYNRGAVVIAAAGNSGSNGNRNTMDYPARYSSVIAVGAVSENNTRASFSSVGSELEVMAPGVNILSTTPGNNYASFNGTSMAAPHVAGAAALIKAKYPSMTNVQIRERLKNTATNLGDPFFYGKGVINVESALQ

SEQ ID NO: 70818 - protein, 275 aa, Bacillus amyloliquefaciens
AQSVPYGVSQIKAPALHSQGYTGSNVKVAVIDSGIDSSHPDLKVAGGASMVPSETNPFQDNNSHGTHVAGTVAALNNNIGVLGVAPSASLYAVKVLGADGSGQYSWIINGIEWAIANNMDVINMSLGGPSGSAALKAAVDKAVASGVVVVAAAGNEGTSGSSSTVGYPGKYPSVIAVGAVDSSNQRASFSSVGPELDVMAPGVSIQSTLPGNKYGALNGTSMASPHVAGAAALILSKHPNWTNTQVRSSLENTTTKLGDSFYYGKGLINVQAAAQ

SEQ ID NO: 70819 - protein, 275 aa, Bacillus amyloliquefaciens
AQSVPYGVSQIKAPALHSQGYTGSNVKVAVIDSGIDSSHPDLKVAGGASMVPXETNPFQDNNSHGTHVAGTVAALNNSIGVLGVAPSASLYAVKVLGADGSGQYSWIINGIEWAIANNMDVINMSLGGPSGSAALKAAVDKAVASGVVVVAAAGNEGTSGSSSTVGYPGKYPSVIAVGAVDSSNQRASFSSVGPELDVMAPGVSIQSTLPGNKYGALNGTSMASPHVAGAAALILSKHPNWTNTQVRSSLENTTTKLGDSFYYGKGLINVQAAAQ

SEQ ID NO: 70820 - protein, 275 aa, Bacillus amyloliquefaciens
AQSVPYGVSQIKAPALHSQGYTGSNVKVAVIDSGIDSSHPDLKVAGGASMVPSETNPFQDNNSHGTHVAGTVAALNNSIGVLGVAPSASLYAVKVLGDRGSGQYSWIINGIEWAIANNMDVINMSLGGPSGSAALKAAVDKAVASGVVVVAAAGNEGTSGSSSTVGYPGKYPSVIAVGAVDSSNQRASFSSVGPELDVMAPGVSIQSTLPGNKYGALNGTSMASPHVAGAAALILSKHPNWTNTQVRSSLENTTTKLGDSFYYGKGLINVQAAAQ

SEQ ID NO: 70821 - protein, 275 aa, Bacillus amyloliquefaciens
AQSVPYGVSQIKAPALHSQGYTGSNVKVAVIDSGIDSSHPDLKVAGGASMVPSETNPFQDNNSHGTHVAGTVAALNNSIGVLGVAPSASLYAVKVLGADGSGQYSWIINGIEWAIANNMDVINMSLGGPSGSAALKAAVDKAVASGVVVVAAAGNSGTSGSSSTVGYPGKYPSVIAVGAVDSSNQRASFSSVGPELDVMAPGVSIQSTLPGNKYGAYNGTSMASPHVAGAAALILSKHPNWTNTQVRSSLENTTTKLGDSFYYGKGLINVQAAAQ

SEQ ID NO: 70822 - protein, 275 aa, Bacillus amyloliquefaciens
AQSVPYGVSQIKAPALHSQGYTGSNVKVAVIDSGIDSSHPDLKVAGGASMVPSETNPFQDNNSHGTHVAGTVAALNNSIGVLGVAPSASLYAVKVLGADGSGQYSWIINGIEWAIANNMDVINMSLGGPSGSAALKAAVDKAVARGVVVVAAAGNEGTSGSSSTVGYPGKYPSVIAVGAVDSSNQRASFSSVGPELDVMAPGVSIQSTLPGNKYGAYNGTSMASPHVAGAAALILSKHPNWTNTQVRSSLENTTTKLGDSFYYGKGLINVQAAAQ

SEQ ID NO: 70823 - protein, 275 aa, Bacillus amyloliquefaciens
AQSVPYGVSQIKAPALHSQGYTGSNVKVAVIDSGIDSSHPDLKVAGGASMVPSETNPFQDNNSHGTHVAGTVAALNNSIGVLGVAPSASLYAVKVLGGHGSGQYSWIINGIEWAIANNMDVINMSLGGPSGSAALKAAVDKAVASGVVVVAAAGNEGTSGSSSTVGYPGKYPSVIAVGAVDSSNQRASFSSVGPELDVMAPGVSIQSTLPGNKYGALNGTSMASPHVAGAAALILSKHPNWTNTQVRSSLENTTTKLGDSFYYGKGLINVQAAAQ

SEQ ID NO: 70824 - protein, 275 aa, Synthetic construct
AQVVPWGIPHIKADKAHASGVTGSGVKVAVLDTGIDANHADLNVKGGASFVSGEPNALQDGNGHGTHVAGTVAALNNTIGVLGVAYNAFLYAVKVLGASGSGTLSGIAQGIEWSIANDMDVINMSLGSSTGSTALQQACNNAYASGIVVVAAAGNSGSNGKRNTMGYPARYSSVIAVGAVDSSNNRASFSSVGSELEVMAPGVSILSTTPGNNYESFNGTSMASPHVAGAAALIKAKYPSMTNVQIRNKLKNTATNLGDAFYYGHGVINVEKALQ

SEQ ID NO: 70825 - protein, 275 aa, Bacillus amyloliquefaciens
AQSVPYGVSQIKAPALHSQGYTGSNVKVAVIDSGIDSSHPDLKVAGGASMVPSETNPFQDNNSHGTHVAGTVAALNNSIGVLGVAPSASLYAVKVLSSGGSGQYSWIINGIEWAIANNMDVINMSLGGPSGSAALKAAVDKAVASGVVVVAAVGNEGTSGSSSTVGYPGKYPSVIAVGAVDSSNQRASFSSVGPELDVMAPGVSIQSTLPGNKYGALNGTSMASPHVAGAAALILSKHPNWTNTQVRSSLENTTTKLGDSFYYGKGLINVQAAAQ

SEQ ID NO: 70826 - protein, 275 aa, Bacillus amyloliquefaciens
AQSVPYGVSQIKAPALHSQGYTGSNVKVAVIDSGIDSSHPDLKVAGGASMVPSETNPFQDNNSHGTHVAGTVAALNNSIGVLGVAPSASLYAVKVLGRHGSGQYSWIINGIEWAIANNMDVINMSLGGPSGSAALKAAVDKAVASGVVVVAAAGNEGTSGSSSTVGYPGKYPSVIAVGAVDSSNQRASFSSVGPELDVMAPGVSIQSTLPGNKYGALNGTSMASPHVAGAAALILSKHPNWTNTQVRSSLENTTTKLGDSFYYGKGLINVQAAAQ

SEQ ID NO: 70827 - protein, 275 aa, Bacillus amyloliquefaciens
AQSVPYGVSQIKAPALHSQGYTGSNVKVAVIDSGIDSSHPDLKVAGGASMVPSETNPFQDNNSHGTHVAGTVAALNNSIGVLGVAPSASLYAVKVLGCNGSGQYSWIINGIEWAIANNMDVINMSLGGPSGSAALKAAVDKAVASGVVVVAAAGNEGTSGSSSTVGYPGKYPSVIAVGAVDSSNQRASFSSVGPELDVMAPGVSIQSTLPGNKYGALNGTSMASPHVAGAAALILSKHPNWTNTQVRSSLENTTTKLGDSFYYGKGLINVQAAAQ

SEQ ID NO: 70828 - protein, 275 aa, unidentified
AQSVPYGVSQIKAPALHSQGYTGSNVKVAVIDSGIDSSHPDLKVAGGASMVPSETNPFQDNNSHGTHVAGTVAALNNSIGVLGVAPSASLYAVKVLGADGSGQYSWIINGIEWAIANNMDVINMSLGGPSGSAALKAAVDKAVASGVVVVAAAGNEGTSGSSSTVGYPGKYPSVIAVGAVDSSNQRASFSSVGPELDVMAPGVSIESTLPGNEYGELNGTSMASPHVAGAAALILSKHPNWTNTQVRSSLENTTTKLGDSFYYGKGLINVQAAAQ

SEQ ID NO: 70829 - protein, 275 aa, Bacillus amyloliquefaciens
AQSVPYGVSQIKAPALHSQGYTGSNVKVAVIDSGIDSSHPDLKVAGGASMVPSETNPFQDNNSHGTHVAGTVAALNNSIGVLGVAPSASLYAVKVLGGDGSGQYSWIINGIEWAIANNMDVINMSLGGPSGSAALKAAVDKAVASGVVVVAAAGNEGTSGSSSTVGYPGKYPSVIAVGAVDSSNQRASFSSVGPELDVMAPGVSIQSTLPGNKYGALNGTSMASPHVAGAAALILSKHPNWTNTQVRSSLENTTTKLGDSFYYGKGLINVQAAAQ

SEQ ID NO: 70830 - protein, 275 aa, Bacillus amyloliquefaciens
AQSVPYGVSQIKAPALHSQGYTGSNVKVAVIDSGIDSSHPDLKVAGGASFVPSETNPFQDNNSHGTHVAGTVAALNNSIGVLGVAPSASLYAVKVLGADGSGQYSWIINGIEWAIANNMDVINMSLGGPSGSAALKAAVDKAVASGVVVVAAAGNEGTSGSSSTVGYPGKYPSVIAVGAVDSSNQRASFSSVGPELDVMAPGVSIQSTLPGNKYGAYNGTSMASPHVAGAAALILSKHPNWTNTQVRSSLENTTTKLGDSFYYGKGLINVQAAAQ

SEQ ID NO: 70831 - protein, 275 aa, Bacillus amyloliquefaciens
AQSVPYGVSQIKAPALHSQGYTGSNVKVAVIDTGIDSSHPDLKVAGGASMVPSETNPFQDNNSHGTHVAGTVAALDNSIGVLGVAPSASLYAVKVLGADGSGQYSWIIGGIEWAIANNMDVINMSLGSPSGSAALKAAVDKAVASGVVVVAAAGNEGTSGSSSTVGYPGKYPSVIAVGAVDSSNQRASFSSVGPELDVMAPGVSIQSTLPGNKYGAYSGTSMASPHVAGAAALILSKHPNWTVTQVRNSLENTTTRLGDSFYYGKGLINVQAAAQ

SEQ ID NO: 70832 - protein, 275 aa, Bacillus amyloliquefaciens
AQSVPYGVSQIKAPALHSQGYTGSNVKVAVIDSGIDSSHPDLKVAGGASMVPSETNPFQDNNSHGTHVAGTVAALNNSIGVLGVAPSASLYAVKVLGADGYGSYSWIINGIEWAIANNMDVINMSLGGPSGSAALKAAVDKAVASGVVVVAAAGNEGTSGSSSTVGYPGKYPSVIAVGAVDSSNQRASFSSVGPELDVMAPGVSIQSTLPGNKYGALNGTSMASPHVAGAAALILSKHPNWTNTQVRSSLENTTTKLGDSFYYGKGLINVQAAAQ

SEQ ID NO: 70833 - protein, 275 aa, Synthetic construct
AQSVPYGVSQIKAPALHSQGYTGSNVKVAVIDSGIDSSHPDLKVAGGASMVPSETNPFQDNNSHGTHVAGTVAALDNSIGVLGVAPSASLTAVKVLGADGSGQYSWIINGIEWAIANNMDVINMSLGGPSGSAALKAAVDKAVASGVVVVAAAGNEGTSGSSSTVGYPGKYPSVIAVGAVDSSNQRASFSSVGPELDVMAPGVSIQSTLPGNKYGALNGTSMASPHVAGAAALILSKHPNWTNTQVRSSLENTTTKLGDSFYYGKGLINVQAAAQ

SEQ ID NO: 70834 - protein, 275 aa, Bacillus amyloliquefaciens
AQSVPYGVSQIKAPALHSQGYTGSNVKVAVIDSGIDSSHPDLKVAGGASMVPSETNPFQDNNSHGTHVAGTVAALNNSIGVLGVAPSASLYAVKVLSRDGSGQYSWIINGIEWAIANNMDVINMSLGGPSGSAALKAAVDKAVASGVVVVAAAGNEGTSGSSSTVGYPGKYPSVIAVGAVDSSNQRASFSSVGPELDVMAPGVSIQSTLPGNKYGALNGTSMASPHVAGAAALILSKHPNWTNTQVRSSLENTTTKLGDSFYYGKGLINVQAAAQ

SEQ ID NO: 70835 - protein, 275 aa, Bacillus amyloliquefaciens
AQSVPYGVSQIKAPALHSQGYTGSNVKVAVIDSGIDSSHPDLKVAGGASMVPSETNPFQDNNSHGTHVAGTVAALNNSIGVLGVAPSASLYAVKVLGHGGSGQYSWIINGIEWAIANNMDVINMSLGGPSGSAALKAAVDKAIASGVVVVAAAGNEGTSGSSSTVGYPGKYPSVIAVGAVDSSNQRASFSSVGPELDVMAPGVSIQSTLPGNKYGALNGTSMASPHVAGAAALILSKHPNWTNTQVRSSLENTTTKLGDSFYYGKGLINVQAAAQ

SEQ ID NO: 70836 - protein, 275 aa, Synthetic construct
AQSVPYGVSQIKAPALHSQGYTGSNVKVAVIDSGIDSSHPDLKVAGGASMVPSETNPFQDNNSHGTHVAGTVAALNNSIGVLGVAPSASLYAVKVLGADGSGQYSWIINGIEWAIANNMDVINMSLGGPSGSAALKAAVDKAVASGVVVVAAAGNEGTSGSSSTVGYPGKYPSVIAVGAVDSSNQRASFSSVGPELDVMAPGVEIESTLPGNKYGELNGTSMASPHVAGAAALILSKHPNWTNTQVRSSLENTTTKLGDSFYYGKGLINVQAAAQ

SEQ ID NO: 70837 - protein, 275 aa, Bacillus amyloliquefaciens
AQSVPYGVSQIKAPALHSQGYTGSNVKVAVIDSGIDSSHPDLKVAGGASMVPSETNPFQDNNSHGTHVAGTVAALNNSIGVLGVAPSASLYAVKVLCRDGSGQYSWIINGIEWAIANNMDVINMSLGGPSGSAALKAAVDKAVASGVVVVAAAGNEGTSGSSSTVGYPGKYPSVIAVGAVDSSNQRASFSSVGPELDVMAPGVSIQSTLPGNKYGALNGTSMASPHVAGAAALILSKHPNWTNTQVRSSLENTTTKLGDSFYYGKGLINVQAAAQ

SEQ ID NO: 70838 - protein, 275 aa, Bacillus amyloliquefaciens
AQSVPYGVSQIKAPALHSQGYTGSNVKVAVIDSGIDSSHPDLKVAGGASMVPSETNPFQDNNSHGTHVAGTVAALNNSIGVLGVVPSASLYAVKVLRSNGSGQYSWIINGIEWAIANNMDVINMSLGGPSGSAALKAAVDKAVASGVVVVAAAGNEGTSGSSSTVGYPGKYPSVIAVGAVDSSNQRASFSSVGPELDVMAPGVSIQSTLPGNKYGALNGTSMASPHVAGAAALILSKHPNWTNTQVRSSLENTTTKLGDSFYYGKGLINVQAAAQ

SEQ ID NO: 70839 - protein, 300 aa, Bacillus subtilis; identical to SEQ ID NO: 88

SEQ ID NO: 70840 - protein, 300 aa, Bacillus amyloliquefaciens
AATTGTGTTLKGKTVSLNISSESGKYVLRDLSKPTGTQIITYDLQNREYNLPGTLVSSTTNQFTTSSQRAAVDAHYNLGKVYDYFYQKFNRNSYDNKGGKIVSSVHYGSRYNNAAWIGDQMIYGDGDGILFSPLSGSMDVTAHEMTHGVTQETANLNYENQPGALNESFSDVFGYFNDTEDWDIGEDITVSQPALRSLSNPTKYGQPDNFKNYKNLPNTPAGDYGGVHTNSGIPNKAAYNTITKIGVNKAEQIYYRALTVYLTPSSTFKDAKAALIQSARDLYGSQDAASVEAAWNAVGL

SEQ ID NO: 70841 - protein, 300 aa, Bacillus amyloliquefaciens
AATTGTGTTLKGKTVSLNISSESGKYVLRDLSKPTGTQIITYDLQNREYNLPGTLVSSTTNQFTTSSQRAAVDAHYNLGKVYDYFYQKFNRNSYDNKGGKIVSSVHYGSRYNNAAWIGDQMIYGDGDGSFFSPLSGSLDVTAHEMTHGVTQETANLNYENQPGALNESFSDVFGYFNDTEDWDIGEDITISQPALRSLSNPTKYGQPDNFKNYKNLPNTPAGDYGGVHTNSGIPNKAAYNTITKIGVNKAEQIYYRALTVYLTPSSTFKDAKAALIQSARDLYGSQDAASVEAAWNAVGL

SEQ ID NO: 70842 - protein, 300 aa, Bacillus amyloliquefaciens
AATTGTGTTLKGKTVSLNISSESGKYVLRDLSKPTGTQIITYDLQNREYNLPGTLVSSTTNQFTTSSQRAAVDAHYNLGKVYDYFYQKFNRNSYDNKGGKIVSSVHYGSRYNNAAWIGDQMIYGDGDGSFFSPLSGSMDVTAHEMTHGVTQETANLNYENQPGALNESFSDVFGYFNDTEDWDIGEDITISQPALRSLSNPTKYGQPDNFKNYKNLPNTPAGDYGGVHTNSGIPNKAAYNTITKIGVNKAEQIYYRALTVYLTPSSTFKDAKAALIQSARDLYGSQDAASVEAAWNAVGL

SEQ ID NO: 70843 - protein, 300 aa, Bacillus amyloliquefaciens
AATTGTGTTLKGKTVSLNISSESGKYVLRDLSKPTGTQIITYDLQNREYNLPGTLVSSTTNQFTTSSQRAAVDAHYNLGKVYDYFYQKFNRNSYDNKGGKIVSSVHYGSRYNNAAWIGDQMIYGDGDGSLFSPLSGSLDVTAHEMTHGVTQETANLNYENQPGALNESFSDVFGYFNDTEDWDIGEDITVSQPALRSLSNPTKYGQPDNFKNYKNLPNTDAGDYGGVHTNSGIPNKAAYNTITKIGVNKAEQIYYRALTVYLTPSSTFKDAKAALIQSARDLYGSQDAASVEAAWNAVGL

SEQ ID NO: 70844 - protein, 300 aa, Bacillus amyloliquefaciens
AATTGTGTTLKGKTVSLNISSESGKYVLRDLSKPTGTQIITYDLQNREYNLPGTLVSSTTNQFTTSSQRAAVDAHYNLGKVYDYFYQKFNRNSYDNKGGKIVSSVHYGSRYNNAAWIGDQMIYGDGDGSFFSPLSGSMDVTAHEMTHGVTQETANLNYENQPGALNESFSDVFGYFNDTEDWDIGEDITISQPALRSLSNPTKYGQPDNFKNYKNLPNTDAGDYGGVHTNSGIPNKAAYNTITKIGVNKAEQIYYRALTVYLTPSSTFKDAKAALIQSARDLYGSQDAASVEAAWNAVGL

SEQ ID NO: 70845 - protein, 300 aa, Bacillus amyloliquefaciens
AATTGTGTTLKGKTVSLNISSESGKYVLRDLSKPTGTQIITYDLQNREYNLPGTLVSSTTNQFTTSSQRAAVDAHYNLGKVYDYFYQKFNRNSYDNKGGKIVSSVHYGSRYNNAAWIGDQMIYGDGDGSVFSPLSGSLDVTAHEMTHGVTQETANLNYENQPGALNESFSDVFGYFNDTEDWDIGEDITVSQPALRSLSNPTKYGQPDNFKNYKNLPNTDAGDYGGVHTNSGIPNKAAYNTITKIGVNKAEQIYYRALTVYLTPSSTFKDAKAALIQSARDLYGSQDAASVEAAWNAVGL

SEQ ID NO: 70846 - protein, 300 aa, Bacillus amyloliquefaciens
AATTGTGTTLKGKTVSLNISSESGKYVLRDLSKPTGTQIITYDLQNREYNLPGTLVSSTTNQFTTSSQRAAVDAHYNLGKVYDYFYQKFNRNSYDNKGGKIVSSVHYGSRYNNAAWIGDQMIYGDGDGSLFSPLSGSLDVTAHEMTHGVTQFTANLNYENQPGALNESFSDVFGYFNDTEDWDIGEDITVSQPALRSLSNPTKYGQPDNFKNYKNLPNTDAGDYGGVHTNSGIPNKAAYNTITKIGVNKAEQIYYRALTVYLTPSSTFKDAKAALIQSARDLYGSQDAASVEAAWNAVGL

SEQ ID NO: 70847 - protein, 300 aa, Bacillus amyloliquefaciens
AATTGTGTTLKGKTVSLNISSESGKYVLRDLSKPTGTQIITYDLQNREYNLPGTLVSSTTNQFTTSSQRAAVDAHYNLGKVYDYFYQKFNRNSYDNKGGKIVSSVHYGSRYNNAAWIGDQMIYGDGDGSFFSPLSGSMDVTAHEMTHGVTQETANLNYENQPGALNESFSDVFGYFNDTEDWDIGEDITISQPALRSLSNPTKYGQPDNFKNYKNLPNTPAGDYGGVHTNSGIPNKAAYNTITKIGVNKAEQIYYRALTVYLTPWSTFKDAKAALIQSARDLYGSQDAASVEAAWNAVGL

SEQ ID NO: 70848 - protein, 300 aa, Bacillus amyloliquefaciens
AATTGTGTTLKGKTVSLNISSESGKYVLRDLSKPTGTQIITYDLQNREYNLPGTLVSSTTNQFTTSSQRAAVDAHYNLGKVYDYFYQKFNRNSYDNKGGKIVSSVHYGSRYNNAAWIGDQMIYGDGDGSFFSPLSGSMDVTAHEMTHGVTQETANLNYENQPGALNESFSDVFGYFNDTEDWDIGEDITISQPALRSLSNPTKYGQPDNFKNYKNLPNTPAGDYGGVHTNSGIPNKAAYNTITKIGVNKAEQIYYRALTVYLTPSSTFKDAKAALIQSARDLYGQQDAASVEAAWNAVGL

SEQ ID NO: 70849 - protein, 300 aa, Bacillus amyloliquefaciens
AATTGTGTTLKGKTVSLNISSESGKYVLRDLSKPTGTQIITYDLQNREYNLPGTLVSSTTNQFTTSSQRAAVDAHYNLGKVYDYFYQKFNRNSYDNKGGKIVSSVHYGSRYNNAAWIGDQMIYGDGDGSLFSPLSGSLDVTAHEMTHGVTQWTANLNYENQPGALNESFSDVFGYFNDTEDWDIGEDITVSQPALRSLSNPTKYGQPDNFKNYKNLPNTDAGDYGGVHTNSGIPNKAAYNTITKIGVNKAEQIYYRALTVYLTPSSTFKDAKAALIQSARDLYGSQDAASVEAAWNAVGL

SEQ ID NO: 70850 - protein, 300 aa, Bacillus amyloliquefaciens
AATTGTGTTLKGKTVSLNISSESGKYVLRDLSKPTGTQIITYDLQNREYNLPGTLVSSTTNQFTTSSQRAAVDAHYNLGKVYDYFYQKFNRNSYDNKGGKIVSSVHYGSRYNNAAWIGDQMIYGDGDGSFFSPLSGSMDVTAHEMTHGVTQETANLNYENQPGALNESFSDVFGYFNDTEDWDIGEDITISQPALRSLSNPTKYGQPDNFKNYKNLPNTEAGDYGGVHTNSGIPNKAAYNTITKIGVNKAEQIYYRALTVYLTPSSTFKDAKAALIQSARDLYGSQDAASVEAAWNAVGL

SEQ ID NO: 70851 - protein, 300 aa, Bacillus amyloliquefaciens
AATTGTGTTLKGKTVSLNISSESGKYVLRDLSKPTGTQIITYDLQNREYNLPGTLVSSTTNQFTTSSQRAAVDAHYNLGKVYDYFYQKFNRNSYDNKGGKIVSSVHYGSRYNNAAWIGDQMIYGDGDGSFFSPLSGSMDVTAHEMTHGVTQETANLNYENQPGALNESFSDVFGYFNDTEDWDIGEDITFSQPALRSLSNPTKYGQPDNFKNYKNLPNTPAGDYGGVHTNSGIPNKAAYNTITKIGVNKAEQIYYRALTVYLTPSSTFKDAKAALIQSARDLYGSQDAASVEAAWNAVGL

SEQ ID NO: 70852 - protein, 300 aa, Bacillus amyloliquefaciens
AATTGTGTTLKGKTVSLNISSESGKYVLRDLSKPTGTQIITYDLQNREYNLPGTLVSSTTNQFTTSSQRAAVDAHYNLGKVYDYFYQKFNRNSYDNKGGKIVSSVHYGSRYNNAAWIGDQMIYGDGDGSLFSPLSGSLDVTAHEMTHGVTQHTANLNYENQPGALNESFSDVFGYFNDTEDWDIGEDITVSQPALRSLSNPTKYGQPDNFKNYKNLPNTDAGDYGGVHTNSGIPNKAAYNTITKIGVNKAEQIYYRALTVYLTPSSTFKDAKAALIQSARDLYGSQDAASVEAAWNAVGL

SEQ ID NO: 70853 - protein, 300 aa, Bacillus amyloliquefaciens
AATTGTGTTLKGKTVSLNISSESGKYVLRDLSKPTGTQIITYDLQNREYNLPGTLVSSTTNQFTTSSQRAAVDAHYNLGKVYDYFYQKFNRNSYDNKGGKIVSSVHYGSRYNNAAWIGDQMIYGDGDGSIFSPLSGSLDVTAHEMTHGVTQETANLNYENQPGALNESFSDVFGYFNDTEDWDIGEDITVSQPALRSLSNPTKYGQPDNFKNYKNLPNTDAGDYGGVHTNSGIPNKAAYNTITKIGVNKAEQIYYRALTVYLTPSSTFKDAKAALIQSARDLYGSQDAASVEAAWNAVGL

SEQ ID NO: 70854 - protein, 300 aa, Bacillus amyloliquefaciens
AATTGTGTTLKGKTVSLNISSESGKYVLRDLSKPTGTQIITYDLQNREYNLPGTLVSSTTNQFTTSSQRAAVDAHYNLGKVYDYFYQKFNRNSYDNKGGKIVSSVHYGSRYNNAAWIGDQMIYGDGDGSFFSPLSGSMDVTAHEMTHGVTQETANLNYENQPGALNESFSDVFGYFNDTEDWDIGEDITVSQPALRSLSNPTKYGQPDNFKNYKNLPNTPAGDYGGVHTNSGIPNKAAYNTITKIGVNKAEQIYYRALTVYLTPSSTFKDAKAALIQSARDLYGSQDAASVEAAWNAVGL

SEQ ID NO: 70855 - protein, 299 aa, Bacillus amyloliquefaciens
AATTGTGTTLKGKTVSLNISSESGKYVLRDLSKPTGTQIITYDLQNREYNLPGTLVSSTTNQFTTSSQRAAVDAHYNLGKVYDYFYQKFNRNSYDNKGGKIVSSVHYGSRYNNAAWIGDQMIYGDGDGSFFSPLSGSMDVTAHEMTHGVTQETANLNYENQPGALNESFSDVFGYFNDTEDWDIGEDITSQPALRSLSNPTKYGQPDNFKNYKNLPNTDAGDYGGVHTNSGIPNKAAYNTITKIGVNKAEQIYYRALTVYLTPSSTFKDAKAALIQSARDLYGSQDAASVEAAWNAVGL

SEQ ID NO: 70856 - protein, 300 aa, Bacillus amyloliquefaciens
AATTGTGTTLKGKTVSLNISSESGKYVLRDLSKPTGTQIITYDLQNREYNLPGTLVSSTTNQFTTSSQRAAVDAHYNLGKVYDYFYQKFNRNSYDNKGGKIVSSVHYGSRYNNAAWIGDQMIYGDGDGIFFSPLSGSMDVTAHEMTHGVTQETANLNYENQPGALNESFSDVFGYFNDTEDWDIGEDITVSQPALRSLSNPTKYGQPDNFKNYKNLPNTDAGDRGGVHTNSGIPNKAAYNTITKIGVNKAEQIYYRALTVYLTPSSTFKDAKAALIQSARDLYGSQDAASVEAAWNAVGL

SEQ ID NO: 70857 - protein, 300 aa, Bacillus amyloliquefaciens
AATTGTGTTLKGKTVSLNISSESGKYVLRDLSKPTGTQIITYDLQNREYNLPGTLVSSTTNQFTTSSQRAAVDAHYNLGKVYDYFYQKFNRNSYDNKGGKIVSSVHYGSRYNNAAWIGDQMIYGDGDGSFFSPLSGSMDVTAHEMTHGVTQETANLNYENQPGALNESFSDVFGYFNDTEDWDIGEDITRSQPALRSLSNPTKYGQPDNFKNYKNLPNTDAGDYGGVHTNSGIPNKAAYNTITKIGVNKAEQIYYRALTVYLTPSSTFKDAKAALIQSARDLYGSQDAASVEAAWNAVGL

SEQ ID NO: 70858 - protein, 300 aa, Bacillus amyloliquefaciens
AATTGTGTTLKGKTVSLNISSESGKYVLRDLSKPTGTQIITYDLQNREYNLPGTLVSSTTNQFTTSSQRAAVDAHYNLGKVYDYFYQKFNRNSYDNKGGKIVSSVHYGSRYNNAAWIGDQMIYGDGDGSFFSPLSGSMDVTAHEMTHGVTQETANLNYENQPGALNESFSDVFGYFNDTEDWDIGEDITVSQPALRSLSNPTKYGQPDNFKNYKNLPNTNAGDYGGVHTNSGIPNKAAYNTITKIGVNKAEQIYYRALTVYLTPSSTFKDAKAALIQSARDLYGSQDAASVEAAWNAVGL

SEQ ID NO: 70859 - protein, 300 aa, Bacillus amyloliquefaciens
AATTGTGTTLKGKTVSLNISSESGKYVLRDLSKPTGTQIITYDLQNREYNLPGTLVSSTTNQFTTSSQRAAVDAHYNLGKVYDYFYQKFNRNSYDNKGGKIVSSVHYGSRYNNAAWIGDQMIYGDGDGSFFSPLSGSMDVTAHEMTHGVTQETANLNYENQPGALNESFSDVFGYFNDTEDWDIGEDITVSQPALRSLSNPTKYGQPDNFKNYKNLPNTPAGDYGGVHTNSGIPNKAAYNTITKIGVNKAEQIYYRALTVYLTPNSTFKDAKAALIQSARDLYGSQDAASVEAAWNAVGL

SEQ ID NO: 70860 - protein, 300 aa, Bacillus amyloliquefaciens
AATTGTGTTLKGKTVSLNISSESGKYVLRDLSKPTGTQIITYDLQNREYNLPGTLVSSTTNQFTTSSQRAAVDAHYNLGKVYDYFYQKFNRNSYDNKGGKIVSSVHYGSRYNNAAWIGDQMIYGDGDGSFFSPLSGSMDVTAHEMTHGVTQETANLNYENQPGALNESFSDVFGYFNDTEDWDIGEDITVSQPALRSLSNPTKYGQPDNFKNYKNLPNTEAGDYGGVHTNSGIPNKAAYNTITKIGVNKAEQIYYRALTVYLTPSSTFKDAKAALIQSARDLYGSQDAASVEAAWNAVGL

SEQ ID NO: 70861 - protein, 300 aa, Bacillus amyloliquefaciens
AATTGTGTTLKGKTVSLNISSESGKYVLRDLSKPTGTQIITYDLQNREYNLPGTLVSSRTNQFTTSSQRAAVDAHYNLGKVYDYFYQKFNRNSYDNKGGKIVSSVHYGSRYNNAAWIGDQMIYGDGDGIFFSPLSGSMDVTAHEMTHGVTQETANLNYENQPGALNESFSDVFGYFNDTEDWDIGEDITVSQPALRSLSNPTKYGQPDNFKNYKNLPNTDAGDYGGVHTNSGIPNKAAYNTITKIGVNKAEQIYYRALTVYLTPSSTFKDAKAALIQSARDLYGSQDAASVEAAWNAVGL

SEQ ID NO: 70862 - protein, 300 aa, Bacillus amyloliquefaciens
AATTGTGTTLKGKTVSLNISSESGKYVLRDLSKPTGTQIITYDLQNREYNLPGTLVSSTTNQFTTSSQRAAVDAHYNLGKVYDYFYQKFNRNSYDNKGGKIVSSVHYGSRYNNAAWIGDQMIYGDGDGFFFSPLSGSMDVTAHEMTHGVTQETANLNYENQPGALNESFSDVFGYFNDTEDWDIGEDITVSQPALRSLSNPTKYGQPDNFKNYKNLPNTDAGDYGGVHTNSGIPNKAAYNTITKIGVNKAEQIYYRALTVYLTPSSTFKDAKAALIQSARDLYGSQDAASVEAAWNAVGL

SEQ ID NO: 70863 - protein, 300 aa, Bacillus amyloliquefaciens
AATTGTGTTLKGKTVSLNISSESGKYVLRDLSKPTGTQIITYDLQNREYNLPGTLVSSTTNQFTTSSQRAAVDAHYNLGKVYDYFYQKFNRNSYDNKGGKIVSSVHYGSRYNNAAWIGDQMIYGDGDGSLFSPLSGSMDVTAHEMTHGVTQFTANLNYENQPGALNESFSDVFGYFNDTEDWDIGEDITVSQPALRSLSNPTKYGQPDNFKNYKNLPNTDAGDYGGVHTNSGIPNKAAYNTITKIGVNKAEQIYYRALTVYLTPSSTFKDAKAALIQSARDLYGSQDAASVEAAWNAVGL

SEQ ID NO: 70864 - protein, 300 aa, Bacillus amyloliquefaciens
AATTGTGTTLKGKTVSLNISSESGKYVLRDLSKPTGTQIITYDLQNREYNLPGTLVSSTTNQFTTSSQRAAVDAHYNLGKVYDYFYQKFNRNSYDNKGGKIVSSVHYGSRYNNAAWIGDQMIYGDGDGYFFSPLSGSMDVTAHEMTHGVTQETANLNYENQPGALNESFSDVFGYFNDTEDWDIGEDITVSQPALRSLSNPTKYGQPDNFKNYKNLPNTDAGDYGGVHTNSGIPNKAAYNTITKIGVNKAEQIYYRALTVYLTPSSTFKDAKAALIQSARDLYGSQDAASVEAAWNAVGL

SEQ ID NO: 70865 - protein, 300 aa, Bacillus amyloliquefaciens
AATTGTGTTLKGKTVSLNISSESGKYVLRDLSKPTGTQIITYDLQNREYNLPGTLVSSTTNQFTTSSQRAAVDAHYNLGKVYDYFYQKFNRNSYDNKGGKIVSSVHYGSRYNNAAWIGDQMIYGDGDGSFFSPLSGSMDVTAHEMTHGVTQETANLNYENQPGALNESFSDVFGYFNDTEDWDIGEDITQSQPALRSLSNPTKYGQPDNFKNYKNLPNTDAGDYGGVHTNSGIPNKAAYNTITKIGVNKAEQIYYRALTVYLTPSSTFKDAKAALIQSARDLYGSQDAASVEAAWNAVGL

SEQ ID NO: 70866 - protein, 300 aa, Bacillus amyloliquefaciens
AATTGTGTTLKGKTVSLNISSESGKYVLRDLSKPTGTQIITYDLQNREYNLPGTLVSSTTNQFTTSSQRAAVDAHYNLGKVYDYFYQKFNRNSYDNKGGKIVSSVHYGSRYNNAAWIGDQMIYGDGDGLFFSPLSGSMDVTAHEMTHGVTQETANLNYENQPGALNESFSDVFGYFNDTEDWDIGEDITVSQPALRSLSNPTKYGQPDNFKNYKNLPNTDAGDYGGVHTNSGIPNKAAYNTITKIGVNKAEQIYYRALTVYLTPSSTFKDAKAALIQSARDLYGSQDAASVEAAWNAVGL

SEQ ID NO: 70867 - protein, 300 aa, Bacillus amyloliquefaciens
AATTGTGTTLKGKTVSLNISSESGKYVLRDLSKPTGTQIITYDLQNREYNLPGTLVSSTTNQFTTSSQRAAVDAHYNLGKVYDYFYQKFNRNSYDNKGGKIVSSVHYGSRYNNAAWIGDQMIYGDGDGSFFSPLSGSMDVTAHEMTHGVTQETANLNYENQPGALNESFSDVFGYFNDTEDWDIGEDITVSQPALRSLSNPTKYGQPDNFKNYKNLPNTPAGDYGGVHTNSGIPNKAAYNTITKIGVNKAEQIYYRALTVYLTPQSTFKDAKAALIQSARDLYGSQDAASVEAAWNAVGL

SEQ ID NO: 70868 - protein, 300 aa, Bacillus amyloliquefaciens
AATTGTGTTLKGKTVSLNISSESGKYVLRDLSKPTGTQIITYDLQNREYNLPGTLVSSTTNQFTTSSQRAAVDAHYNLGKVYDYFYQKFNRNSYDNKGGKIVSSVHYGSRYNNAAWIGDQMIYGDGDGSFFSPLSGSMDVTAHEMTHGVTQETANLNYENQPGALNESFSDVFGYFNDTEDWDIGEDITHSQPALRSLSNPTKYGQPDNFKNYKNLPNTDAGDYGGVHTNSGIPNKAAYNTITKIGVNKAEQIYYRALTVYLTPSSTFKDAKAALIQSARDLYGSQDAASVEAAWNAVGL

SEQ ID NO: 70869 - protein, 300 aa, Bacillus amyloliquefaciens
AATTGTGTTLKGKTVSLNISSESGKYVLRDLSKPTGTQIITYDLQNREYNLPGTLVSSTTNQFTTSSQRAAVDAHYNLGKVYDYFYQKFNRNSYDNKGGKIVSSVHYGSRYNNAAWIGDQMIYGDGDGSFFSPLSGSLDVTAHEMTHGVTQWTANLNYENQPGALNESFSDVFGYFNDTEDWDIGEDITVSQPALRSLSNPTKYGQPDNFKNYKNLPNTDAGDYGGVHTNSGIPNKAAYNTITKIGVNKAEQIYYRALTVYLTPSSTFKDAKAALIQSARDLYGSQDAASVEAAWNAVGL

SEQ ID NO: 70870 - protein, 300 aa, Bacillus amyloliquefaciens
AATTGTGTTLKGKTVSLNISSESGKYVLRDLSKPTGTQIITYDLQNREYNLPGTLVSSTTNQFTTSSQRAAVDAHYNLGKVYDYFYQKFNRNSYDNKGGKIVSSVHYGSRYNNAAWIGDQMIYGDGDGSVFSPLSGSLDVTAHEMTHGVTQFTANLNYENQPGALNESFSDVFGYFNDTEDWDIGEDITVSQPALRSLSNPTKYGQPDNFKNYKNLPNTDAGDYGGVHTNSGIPNKAAYNTITKIGVNKAEQIYYRALTVYLTPSSTFKDAKAALIQSARDLYGSQDAASVEAAWNAVGL

SEQ ID NO: 70871 - protein, 300 aa, Bacillus amyloliquefaciens
AATTGTGTTLKGKTVSLNISSESGKYVLRDLSKPTGTQIITYDLQNREYNLPGTLVSSTTNQFTTSSQRAAVDAHYNLGKVYDYFYQKFNRNSYDNKGGKIVSSVHYGSRYNNAAWIGDQMIYGDGDGSFFSPLSGSMDVTAHEMTHGVTQETANLNYENQPGALNESFSDVFGYFNDTEDWDIGEDITISQPALRSLSNPTKYGQPDNFKNYKNLPNTDAGDRGGVHTNSGIPNKAAYNTITKIGVNKAEQIYYRALTVYLTPSSTFKDAKAALIQSARDLYGSQDAASVEAAWNAVGL

SEQ ID NO: 70872 - protein, 300 aa, Bacillus amyloliquefaciens
AATTGTGTTLKGKTVSLNISSESGKYVLRDLSKPTGTQIITYDLQNREYNLPGTLVSSTTNQFTTSSQRAAVDAHYNLGKVYDYFYQKFNRNSYDNKGGKIVSSVHYGSRYNNAAWIGDQMIYGDGDGSFFSPLSGSMDVTAHEMTHGVTQETANLNYENQPGALNESFSDVFGYFNDTEDWDIGEDITLSQPALRSLSNPTKYGQPDNFKNYKNLPNTEAGDYGGVHTNSGIPNKAAYNTITKIGVNKAEQIYYRALTVYLTPSSTFKDAKAALIQSARDLYGSQDAASVEAAWNAVGL

SEQ ID NO: 70873 - protein, 300 aa, Bacillus amyloliquefaciens
AATTGTGTTLKGKTVSLNISSESGKYVLRDLSKPTGTQIITYDLQNREYNLPGTLVSSTTNQFTTSSQRAAVDAHYNLGKVYDYFYQKFNRNSYDNKGGKIVSSVHYGSRYNNAAWIGDQMIYGDGDGSFFSPLSGSMDVTAHEMTHGVTQETANLNYENQPGALNESFSDVFGYFNDTEDWDIGEDITISQPALRSLSNPTKYGQPDNFKNYKNLPNTEAGDYGGVHTNSGIPNKAAYNTITKIGVNKAEQIYYRALTVYLTPWSTFKDAKAALIQSARDLYGSQDAASVEAAWNAVGL

SEQ ID NO: 70874 - protein, 300 aa, Bacillus amyloliquefaciens
AATTGTGTTLKGKTVSLNISSESGKYVLRDLSKPTGTQIITYDLQNREYNLPGTLVSSTTNQFTTSSQRAAVDAHYNLGKVYDYFYQKFNRNSYDNKGGKIVSSVHYGSRYNNAAWIGDQMIYGDGDGSRFSPLSGSMDVTAHEMTHGVTQETANLNYENQPGALNESFSDVFGYFNDTEDWDIGEDITVSQPALRSLSNPTKYGQPDNFKNYKNLPNTDAGDYGGVHTNSGIPNKAAYNTITKIGVNKAEQIYYRALTVYLTPSSTFKDAKAALIQSARDLYGSQDAASVEAAWNAVGL

SEQ ID NO: 70875 - protein, 300 aa, Bacillus amyloliquefaciens
AATTGTGTTLKGKTVSLNISSESGKYVLRDLSKPTGTQIITYDLQNREYNLPGTLVSSTTNQFTTSSQRAAVDAHYNLGKVYDYFYQKFNRNSYDNKGGKIVSSVHYGSRYNNAAWIGDQMIYGDGDGSFFSPLSGSMDVTAHEMTHGVTQETANLNYENQPGALNESFSDVFGYFNDTEDWDIGEDITISQPALRSLSNPTKYGQPDNFKNYKNLPNTEAGDYGGVHTNSGIPNKAAYNTITKIGVNKAEQIYYRALTVYLTPQSTFKDAKAALIQSARDLYGSQDAASVEAAWNAVGL

SEQ ID NO: 70876 - protein, 300 aa, Bacillus amyloliquefaciens
AATTGTGTTLKGKTVSLNISSESGKYVLRDLSKPTGTQIITYDLQNREYNLPGTLVSSTTNQFTTSSQRAAVDAHYNLGKVYDYFYQKFNRNSYDNKGGKIVSSVHYGSRYNNAAWIGDQMIYGDGDGSFFSPLSGSMDVTAHEMTHGVTQETANLNYENQPGALNESFSDVFGYFNDTEDWDIGEDITVSQPALRSLSNPTKYGQPDNFKNYKNLPNTPAGDYGGVHTNSGIPNKAAYNTITKIGVNKAEQIYYRALTVYLTPWSTFKDAKAALIQSARDLYGSQDAASVEAAWNAVGL

SEQ ID NO: 70877 - protein, 300 aa, Bacillus amyloliquefaciens
AATTGTGTTLKGKTVSLNISSESGKYVLRDLSKPTGTQIITYDLQNREYNLPGTLVSSTTNQFTTSSQRAAVDAHYNLGKVYDYFYQKFNRNSYDNKGGKIVSSVHYGSRYNNAAWIGDQMIYGDGDGSFFSPLSGSVDVTAHEMTHGVTQETANLNYENQPGALNESFSDVFGYFNDTEDWDIGEDITVSQPALRSLSNPTKYGQPDNFKNYKNLPNTDAGDYGGVHTNSGIPNKAAYNTITKIGVNKAEQIYYRALTVYLTPSSTFKDAKAALIQSARDLYGSQDAASVEAAWNAVGL

SEQ ID NO: 70878 - protein, 300 aa, Bacillus amyloliquefaciens
AATTGTGTTLKGKTVSLNISSESGKYVLRDLSKPTGTQIITYDLQNREYNLPGTLVSSTTNQFTTSSQRAAVDAHYNLGKVYDYFYQKFNRNSYDNKGGKIVSSVHYGSRYNNAAWIGDQMIYGDGDGSLFSPLSGSMDVTAHEMTHGVTQHTANLNYENQPGALNESFSDVFGYFNDTEDWDIGEDITVSQPALRSLSNPTKYGQPDNFKNYKNLPNTDAGDYGGVHTNSGIPNKAAYNTITKIGVNKAEQIYYRALTVYLTPSSTFKDAKAALIQSARDLYGSQDAASVEAAWNAVGL

SEQ ID NO: 70879 - protein, 300 aa, Bacillus amyloliquefaciens
AATTGTGTTLKGKTVSLNISSESGKYVLRDLSKPTGTQIITYDLQNREYNLPGTLVSSTTNQFTTSSQRAAVDAHYNLGKVYDYFYQKFNRNSYDNKGGKIVSSVHYGSRYNNAAWIGDQMIYGDGDGWFFSPLSGSMDVTAHEMTHGVTQETANLNYENQPGALNESFSDVFGYFNDTEDWDIGEDITVSQPALRSLSNPTKYGQPDNFKNYKNLPNTDAGDYGGVHTNSGIPNKAAYNTITKIGVNKAEQIYYRALTVYLTPSSTFKDAKAALIQSARDLYGSQDAASVEAAWNAVGL

SEQ ID NO: 70880 - protein, 300 aa, Bacillus amyloliquefaciens
AATTGTGTTLKGKTVSLNISSESGKYVLRDLSKPTGTQIITYDLQNREYNLPGTLVSSTTNQFTTSSQRAAVDAHYNLGKVYDYFYQKFNRNSYDNKGGKIVSSVHYGSRYNNAAWIGDQMIYGDGDGSIFSPLSGSLDVTAHEMTHGVTQETANLNYENQPGALNESFSDVFGYFNDPEDWDIGEDITVSQPALRSLSNPTKYGQPDNFKNYKNLPNTDAGDYGGVHTNSGIPNKAAYNTITKIGVNKAEQIYYRALTVYLTPSSTFKDAKAALIQSARDLYGSQDAASVEAAWNAVGL

SEQ ID NO: 70881 - protein, 300 aa, Bacillus amyloliquefaciens
AATTGTGTTLKGKTVSLNISSESGKYVLRDLSKPTGTQIITYDLQNREYNLPGTLVSSTTNQFTTSSQRAAVDAHYNLGKVYDYFYQKFNRNSYDNKGGKIVSSVHYGSRYNNAAWIGDQMIYGDGDGRFFSPLSGSMDVTAHEMTHGVTQETANLNYENQPGALNESFSDVFGYFNDTEDWDIGEDITVSQPALRSLSNPTKYGQPDNFKNYKNLPNTDAGDYGGVHTNSGIPNKAAYNTITKIGVNKAEQIYYRALTVYLTPSSTFKDAKAALIQSARDLYGSQDAASVEAAWNAVGL

SEQ ID NO: 70882 - protein, 300 aa, Bacillus amyloliquefaciens
AATTGTGTTLKGKTVSLNISSESGKYVLRDLSKPTGTQIITYDLQNREYNLPGTLVSSTTNQFTTSSQRAAVDAHYNLGKVYDYFYQKFNRNSYDNKGGKIVSSVHYGSRYNNAAWIGDQMIYGDGDGKFFSPLSGSMDVTAHEMTHGVTQETANLNYENQPGALNESFSDVFGYFNDTEDWDIGEDITVSQPALRSLSNPTKYGQPDNFKNYKNLPNTDAGDYGGVHTNSGIPNKAAYNTITKIGVNKAEQIYYRALTVYLTPSSTFKDAKAALIQSARDLYGSQDAASVEAAWNAVGL

SEQ ID NO: 70883 - protein, 300 aa, Bacillus amyloliquefaciens
AATTGTGTTLKGKTVSLNISSESGKYVLRDLSKPTGTQIITYDLQNREYNLPGTLVSSTTNQFTTSSQRAAVDAHYNLGKVYDYFYQKFNRNSYDNKGGKIVSSVHYGSRYNNAAWIGDQMIYGDGDGSLFSPLSGSMDVTAHEMTHGVTQWTANLNYENQPGALNESFSDVFGYFNDTEDWDIGEDITVSQPALRSLSNPTKYGQPDNFKNYKNLPNTDAGDYGGVHTNSGIPNKAAYNTITKIGVNKAEQIYYRALTVYLTPSSTFKDAKAALIQSARDLYGSQDAASVEAAWNAVGL

SEQ ID NO: 70884 - protein, 300 aa, Bacillus amyloliquefaciens
AATTGTGTTLKGKTVSLNISSESGKYVLRDLSKPTGTQIITYDLQNREYNLPGTLVSSTTNQFTTSSQRAAVDAHYNLGKVYDYFYQKFNRNSYDNKGGKIVSSVHYGSRYNNAAWIGDQMIYGDGDGSVFSPLSGSLDVTAHEMTHGVTQHTANLNYENQPGALNESFSDVFGYFNDTEDWDIGEDITVSQPALRSLSNPTKYGQPDNFKNYKNLPNTDAGDYGGVHTNSGIPNKAAYNTITKIGVNKAEQIYYRALTVYLTPSSTFKDAKAALIQSARDLYGSQDAASVEAAWNAVGL

SEQ ID NO: 70885 - protein, 300 aa, Bacillus amyloliquefaciens
AATTGTGTTLKGKTVSLNISSESGKYVLRDLSKPTGTQIITYDLQNREYNLPGTLVSSTTNQFTTSSQRAAVDAHYNLGKVYDYFYQKFNRNSYDNKGGKIVSSVHYGSRYNNAAWIGDQMIYGDGDGGFFSPLSGSMDVTAHEMTHGVTQETANLNYENQPGALNESFSDVFGYFNDTEDWDIGEDITVSQPALRSLSNPTKYGQPDNFKNYKNLPNTDAGDYGGVHTNSGIPNKAAYNTITKIGVNKAEQIYYRALTVYLTPSSTFKDAKAALIQSARDLYGSQDAASVEAAWNAVGL

SEQ ID NO: 70886 - protein, 300 aa, Bacillus amyloliquefaciens
AATTGTGTTLKGKTVSLNISSESGKYVLRDLSKPTGTQIITYDLQNREYNLPGTLVSSTTNQFTTSSQRAAVDAHYNLGKVYDYFYQKFNRNSYDNKGGKIVSSVHYGSRYNNAAWIGDQMIYGDGDGSKFSPLSGSMDVTAHEMTHGVTQETANLNYENQPGALNESFSDVFGYFNDTEDWDIGEDITVSQPALRSLSNPTKYGQPDNFKNYKNLPNTDAGDYGGVHTNSGIPNKAAYNTITKIGVNKAEQIYYRALTVYLTPSSTFKDAKAALIQSARDLYGSQDAASVEAAWNAVGL

SEQ ID NO: 70887 - protein, 300 aa, Bacillus amyloliquefaciens
AATTGTGTTLKGKTVSLNISSESGKYVLRDLSKPTGTQIITYDLQNREYNLPGTLVSSTTNQFTTSSQRAAVDAHYNLGKVYDYFYQKFNRNSYDNKGGKIVSSVHYGSRYNNAAWIGDQMIYGDGDGSIFSPLSGSLDVTAHEMTHGVTQWTANLNYENQPGALNESFSDVFGYFNDTEDWDIGEDITVSQPALRSLSNPTKYGQPDNFKNYKNLPNTDAGDYGGVHTNSGIPNKAAYNTITKIGVNKAEQIYYRALTVYLTPSSTFKDAKAALIQSARDLYGSQDAASVEAAWNAVGL

SEQ ID NO: 70888 - protein, 300 aa, Bacillus amyloliquefaciens
AATTGTGTTLKGKTVSLNISSESGKYVLRDLSKPTGTQIITYDLQNREYNLPGTLVSSTTNQFTTSSQRAAVDAHYNLGKVYDYFYQKFNRNSYDNKGGKIVSSVHYGSRYNNAAWIGDQMIYGDGDGSFFSPLSGSMDVTAHEMTHGVTQETANLNYENQPGALNESFSDVFGYFNDTEDWDIGEDITVSQPALRSLSNPTKYGQPDNFKNYKNLPNTHAGDYGGVHTNSGIPNKAAYNTITKIGVNKAEQIYYRALTVYLTPSSTFKDAKAALIQSARDLYGSQDAASVEAAWNAVGL

SEQ ID NO: 70889 - protein, 300 aa, Bacillus amyloliquefaciens
AATTGTGTTLKGKTVSLNISSESGKYVLRDLSKPTGTQIITYDLQNREYNLPGTLVSSTTNQFTTSSQRAAVDAHYNLGKVYDYFYQKFNRNSYDNKGGKIVSSVHYGSRYNNAAWIGDQMIYGDGDGSFFSPLSGSIDVTAHEMTHGVTQETANLNYENQPGALNESFSDVFGYFNDTEDWDIGEDITVSQPALRSLSNPTKYGQPDNFKNYKNLPNTDAGDYGGVHTNSGIPNKAAYNTITKIGVNKAEQIYYRALTVYLTPSSTFKDAKAALIQSARDLYGSQDAASVEAAWNAVGL

SEQ ID NO: 70890 - protein, 300 aa, Bacillus amyloliquefaciens
AATTGTGTTLKGKTVSLNISSESGKYVLRDLSKPTGTQIITYDLQNREYNLPGTLVSSTTNQFTTSSQRAAVDAHYNLGKVYDYFYQKFNRNSYDNKGGKIVSSVHYGSRYNNAAWIGDQMIYGDGDGSLFSPLSGSMDVTAHEMTHGVTQETANLNYENQPGALNESFSDVFGYFNDPEDWDIGEDITVSQPALRSLSNPTKYGQPDNFKNYKNLPNTDAGDYGGVHTNSGIPNKAAYNTITKIGVNKAEQIYYRALTVYLTPSSTFKDAKAALIQSARDLYGSQDAASVEAAWNAVGL

SEQ ID NO: 70891 - protein, 300 aa, Bacillus amyloliquefaciens
AATTGTGTTLKGKTVSLNISSESGKYVLRDLSKPTGTQIITYDLQNREYNLPGTLVSSTTNQFTTSSQRAAVDAHYNLGKVYDYFYQKFNRNSYDNKGGKIVSSVHYGSRYNNAAWIGDQMIYGDGDGSVFSPLSGSLDVTAHEMTHGVTQETANLNYENQPGALNESFSDVFGYFNDPEDWDIGEDITVSQPALRSLSNPTKYGQPDNFKNYKNLPNTDAGDYGGVHTNSGIPNKAAYNTITKIGVNKAEQIYYRALTVYLTPSSTFKDAKAALIQSARDLYGSQDAASVEAAWNAVGL

SEQ ID NO: 70892 - protein, 300 aa, Bacillus amyloliquefaciens
AATTGTGTTLKGKTVSLNISSESGKYVLRDLSKPTGTQIITYDLQNREYNLPGTLVSSTTNQFTTSSQRAAVDAHYNLGKVYDYFYQKFNRNSYDNKGGKIVSSVHYGSRYNNAAWIGDQMIYGDGDGSFFSPLSGSMDVTAHEMTHGVTQETANLNYENQPGALNESFSDVFGYFNDTEDWDIGEDITISQPALRSLSNPTKYGQPDNFKNYKNLPNTDAGDYGGVHTNSGIPNKAAYNTITKIGVNKAEQIYYRALTVYLTPWSTFKDAKAALIQSARDLYGSQDAASVEAAWNAVGL

SEQ ID NO: 70893 - protein, 300 aa, Bacillus amyloliquefaciens
AATTGTGTTLKGKTVSLNISSESGKYVLRDLSKPTGTQIITYDLQNREYNLPGTLVSSTTNQFTTSSQRAAVDAHYNLGKVYDYFYQKFNRNSYDNKGGKIVSSVHYGSRYNNAAWIGDQMIYGDGDGSLFSPLSGSLDVTAHEMTHGVTQHTANLNYENQPGALNESFSDVFGYFNDPEDWDIGEDITVSQPALRSLSNPTKYGQPDNFKNYKNLPNTDAGDYGGVHTNSGIPNKAAYNTITKIGVNKAEQIYYRALTVYLTPSSTFKDAKAALIQSARDLYGSQDAASVEAAWNAVGL

SEQ ID NO: 70894 - protein, 300 aa, Bacillus amyloliquefaciens
AATTGTGTTLKGKTVSLNISSESGKYVLRDLSKPTGTQIITYDLQNREYNLPGTLVSSWTNQFTTSSQRAAVDAHYNLGKVYDYFYQKFNRNSYDNKGGKIVSSVHYGSRYNNAAWIGDQMIYGDGDGIFFSPLSGSMDVTAHEMTHGVTQETANLNYENQPGALNESFSDVFGYFNDTEDWDIGEDITVSQPALRSLSNPTKYGQPDNFKNYKNLPNTDAGDYGGVHTNSGIPNKAAYNTITKIGVNKAEQIYYRALTVYLTPSSTFKDAKAALIQSARDLYGSQDAASVEAAWNAVGL

SEQ ID NO: 70895 - protein, 300 aa, Bacillus amyloliquefaciens
AATTGTGTTLKGKTVSLNISSESGKYVLRDLSKPTGTQIITYDLQNREYNLPGTLVSSTTNQFTTSSQRAAVDAHYNLGKVYDYFYQKFNRNSYDNKGGKIVSSVHYGSRYNNAAWIGDQMIYGDGDGSFFSPLSGSLDVTAHEMTHGVTQHTANLNYENQPGALNESFSDVFGYFNDTEDWDIGEDITVSQPALRSLSNPTKYGQPDNFKNYKNLPNTDAGDYGGVHTNSGIPNKAAYNTITKIGVNKAEQIYYRALTVYLTPSSTFKDAKAALIQSARDLYGSQDAASVEAAWNAVGL

SEQ ID NO: 70896 - protein, 300 aa, Bacillus amyloliquefaciens
AATTGTGTTLKGKTVSLNISSESGKYVLRDLSKPTGTQIITYDLQNREYNLPGTLVSSTTNQFTTSSQRAAVDAHYNLGKVYDYFYQKFNRNSYDNKGGKIVSSVHYGSRYNNAAWIGDQMIYGDGDGSFFSPLSGSQDVTAHEMTHGVTQETANLNYENQPGALNESFSDVFGYFNDTEDWDIGEDITVSQPALRSLSNPTKYGQPDNFKNYKNLPNTDAGDYGGVHTNSGIPNKAAYNTITKIGVNKAEQIYYRALTVYLTPSSTFKDAKAALIQSARDLYGSQDAASVEAAWNAVGL

SEQ ID NO: 70897 - protein, 300 aa, Bacillus amyloliquefaciens
AATTGTGTTLKGKTVSLNISSESGKYVLRDLSKPTGTQIITYDLQNREYNLPGTLVSSKTNQFTTSSQRAAVDAHYNLGKVYDYFYQKFNRNSYDNKGGKIVSSVHYGSRYNNAAWIGDQMIYGDGDGIFFSPLSGSMDVTAHEMTHGVTQETANLNYENQPGALNESFSDVFGYFNDTEDWDIGEDITVSQPALRSLSNPTKYGQPDNFKNYKNLPNTDAGDYGGVHTNSGIPNKAAYNTITKIGVNKAEQIYYRALTVYLTPSSTFKDAKAALIQSARDLYGSQDAASVEAAWNAVGL

SEQ ID NO: 70898 - protein, 300 aa, Bacillus amyloliquefaciens
AATTGTGTTLKGKTVSLNISSESGKYVLRDLSKPTGTQIITYDLQNREYNLPGTLVSSTTNQFTTSSQRAAVDAHYNLGKVYDYFYQKFNRNSYDNKGGKIVSSVHYGSRYNNAAWIGDQMIYGDGDGSFFSPLSGSMDVTAHEMTHGVTQETANLNYENQPGALNESFSDVFGYFNDTEDWDIGEDITKSQPALRSLSNPTKYGQPDNFKNYKNLPNTDAGDYGGVHTNSGIPNKAAYNTITKIGVNKAEQIYYRALTVYLTPSSTFKDAKAALIQSARDLYGSQDAASVEAAWNAVGL

SEQ ID NO: 70899 - protein, 300 aa, Bacillus amyloliquefaciens
AATTGTGTTLKGKTVSLNISSESGKYVLRDLSKPTGTQIITYDLQNREYNLPGTLVSSTTNQFTTSSQRAAVDAHYNLGKVYDYFYQKFNRNSYDNKGGKIVSSVHYGSRYNNAAWIGDQMIYGDGDGSLFSPLSGSMDVTAHEMTHGVTQETANLNYENQPGALNESFSDVFGYFNDTEDWDIGEDITVSQPALRSLSNPTKYGQPDNFKNYKNLPNTDAGDRGGVHTNSGIPNKAAYNTITKIGVNKAEQIYYRALTVYLTPSSTFKDAKAALIQSARDLYGSQDAASVEAAWNAVGL

SEQ ID NO: 70900 - protein, 300 aa, Bacillus amyloliquefaciens
AATTGTGTTLKGKTVSLNISSESGKYVLRDLSKPTGTQIITYDLQNREYNLPGTLVSSTTNQFTTSSQRAAVDAHYNLGKVYDYFYQKFNRNSYDNKGGKIVSSVHYGSRYNNAAWIGDQMIYGDGDGSIFSPLSGSLDVTAHEMTHGVTQHTANLNYENQPGALNESFSDVFGYFNDTEDWDIGEDITVSQPALRSLSNPTKYGQPDNFKNYKNLPNTDAGDYGGVHTNSGIPNKAAYNTITKIGVNKAEQIYYRALTVYLTPSSTFKDAKAALIQSARDLYGSQDAASVEAAWNAVGL

SEQ ID NO: 70901 - protein, 300 aa, Bacillus amyloliquefaciens
AATTGTGTTLKGKTVSLNISSESGKYVLRDLSKPTGTQIITYDLQNREYNLPGTLVSSTTNQFTTSSQRAAVDAHYNLGKVYDYFYQKFNRNSYDNKGGKIVSSVHYGSRYNNAAWIGDQMIYGDGDGAFFSPLSGSMDVTAHEMTHGVTQETANLNYENQPGALNESFSDVFGYFNDTEDWDIGEDITVSQPALRSLSNPTKYGQPDNFKNYKNLPNTDAGDYGGVHTNSGIPNKAAYNTITKIGVNKAEQIYYRALTVYLTPSSTFKDAKAALIQSARDLYGSQDAASVEAAWNAVGL

SEQ ID NO: 70902 - protein, 300 aa, Bacillus amyloliquefaciens
AATTGTGTTLKGKTVSLNISSESGKYVLRDLSKPTGTQIITYDLQNREYNLPGTLVSSTTNQFTTSSQRAAVDAHYNLGKVYDYFYQKFNRNSYDNKGGKIVSSVHYGSRYNNAAWIGDQMIYGDGDGSIFSPLSGSLDVTAHEMTHGVTQFTANLNYENQPGALNESFSDVFGYFNDTEDWDIGEDITVSQPALRSLSNPTKYGQPDNFKNYKNLPNTDAGDYGGVHTNSGIPNKAAYNTITKIGVNKAEQIYYRALTVYLTPSSTFKDAKAALIQSARDLYGSQDAASVEAAWNAVGL

SEQ ID NO: 70903 - protein, 300 aa, Bacillus amyloliquefaciens
AATTGTGTTLKGKTVSLNISSESGKYVLRDLSKPTGTQIITYDLQNREYNLPGTLVSSTTNQFTTSSQRAAVDAHYNLGKVYDYFYQKFNRNSYDNKGGKIVSSVHYGSRYNNAAWIGDQMIYGDGDGHFFSPLSGSMDVTAHEMTHGVTQETANLNYENQPGALNESFSDVFGYFNDTEDWDIGEDITVSQPALRSLSNPTKYGQPDNFKNYKNLPNTDAGDYGGVHTNSGIPNKAAYNTITKIGVNKAEQIYYRALTVYLTPSSTFKDAKAALIQSARDLYGSQDAASVEAAWNAVGL

SEQ ID NO: 70904 - protein, 300 aa, Bacillus amyloliquefaciens
AATTGTGTTLKGKTVSLNISSESGKYVLRDLSKPTGTQIITYDLQNREYNLPGTLVSSTTNQFTTSSQRAAVDAHYNLGKVYDYFYQKFNRNSYDNKGGKIVSSVHYGSRYNNAAWIGDQMIYGDGDGSFFSPLSGSMDVTAHEMTHGVTQETANLNYENQPGALNESFSDVFGYFNDTEDWDIGEDITISQPALRSLSNPTKYGQPDNFKNYKNLPNTDAGDYGGVHTNSGIPNKAAYNTITKIGVNKAEQIYYRALTVYLTPLSTFKDAKAALIQSARDLYGSQDAASVEAAWNAVGL

SEQ ID NO: 70905 - protein, 300 aa, Bacillus amyloliquefaciens
AATTGTGTTLKGKTVSLNISSESGKYVLRDLSKPTGTQIITYDLQNREYNLPGTLVSSTTNQFTTSSQRAAVDAHYNLGKVYDYFYQKFNRNSYDNKGGKIVSSVHYGSRYNNAAWIGDQMIYGDGDGSFFSPLSGSLDVTAHEMTHGVTQETANLNYENQPGALNESFSDVFGYFNDTEDWDIGEDITVSQPALRSLSNPTKYGQPDNFKNYKNLPNTDAGDRGGVHTNSGIPNKAAYNTITKIGVNKAEQIYYRALTVYLTPSSTFKDAKAALIQSARDLYGSQDAASVEAAWNAVGL

SEQ ID NO: 70906 - protein, 300 aa, Bacillus amyloliquefaciens
AATTGTGTTLKGKTVSLNISSESGKYVLRDLSKPTGTQIITYDLQNREYNLPGTLVSSTTNQFTTQSQRAAVDAHYNLGKVYDYFYQKFNRNSYDNKGGKIVSSVHYGSRYNNAAWIGDQMIYGDGDGSFFSPLSGSLDVTAHEMTHGVTQETANLNYENQPGALNESFSDVFGYFNDTEDWDIGEDITVSQPALRSLSNPTKYGQPDNFKNYKNLPNTDAGDYGGVHTNSGIPNKAAYNTITKIGVNKAEQIYYRALTVYLTPSSTFKDAKAALIQSARDLYGSQDAASVEAAWNAVGL

SEQ ID NO: 70907 - protein, 300 aa, Bacillus amyloliquefaciens
AATTGTGTTLKGKTVSLNISSESGKYVLRDLSKPTGTQIITYDLQNREYNLPGTLVSSTTNQFTTSSQRAAVDAHYNLGKVYDYFYQKFNRNSYDNKGGKIVSSVHYGSRYNNAAWIGDQMIYGDGDGSFFSPLSGSMDVTAHEMTHGVTQETANLNYENQPGALNESFSDVFGYFNDTEDWDIGEDITVSQPALRSLSNPTKYGQPDNFKNYKNLPNTDAGDYGGVHTNSGIPNKAAYNTITKIGVNKAEQIYYRALTVYLTPSSTFKDAKAALIQSARDLYGSQDAASVEAAWNAVGL

SEQ ID NO: 70908 - protein, 300 aa, Bacillus amyloliquefaciens
AATTGTGTTLKGKTVSLNISSESGKYVLRDLSKPTGTQIITYDLQNREYNLPGTLVSSTTNQFTTSSQRAAVDAHYNLGKVYDYFYQKFNRNSYDNKGGKIVSSVHYGSRYNNAAWIGDQMIYGDGDGTFFSPLSGSMDVTAHEMTHGVTQETANLNYENQPGALNESFSDVFGYFNDTEDWDIGEDITVSQPALRSLSNPTKYGQPDNFKNYKNLPNTDAGDYGGVHTNSGIPNKAAYNTITKIGVNKAEQIYYRALTVYLTPSSTFKDAKAALIQSARDLYGSQDAASVEAAWNAVGL

SEQ ID NO: 70909 - protein, 300 aa, Bacillus amyloliquefaciens
AATTGTGTTLKGKTVSLNISSESGKYVLRDLSKPTGTQIITYDLQNREYNLPGTLVSSTTNQFTTSSQRAAVDAHYNLGKVYDYFYQKFNRNSYDNKGGKIVSSVHYGSRYNNAAWIGDQMIYGDGDGVFFSPLSGSMDVTAHEMTHGVTQETANLNYENQPGALNESFSDVFGYFNDTEDWDIGEDITVSQPALRSLSNPTKYGQPDNFKNYKNLPNTDAGDYGGVHTNSGIPNKAAYNTITKIGVNKAEQIYYRALTVYLTPSSTFKDAKAALIQSARDLYGSQDAASVEAAWNAVGL

SEQ ID NO: 70910 - protein, 300 aa, Bacillus amyloliquefaciens
AATTGTGTTLKGKTVSLNISSESGKYVLRDLSKPTGTQIITYDLQNREYNLPGTLVSSTTNQFTTSSQRAAVDAHYNLGKVYDYFYQKFNRNSYDNKGGKIVSSVHYGSRYNNAAWIGDQMIYGDGDGSFFSPLSGSMDVTAHEMTHGVTQETANLNYENQPGALNESFSDVFGYFNDTEDWDIGEDITFSQPALRSLSNPTKYGQPDNFKNYKNLPNTPAGDYGGVHTNSGIPNKAAYNTITKIGVNKAEQIYYRALTVYLTPWSTFKDAKAALIQSARDLYGSQDAASVEAAWNAVGL

SEQ ID NO: 70911 - protein, 300 aa, Bacillus amyloliquefaciens
AATHGTGTTLKGKTVSLNISSESGKYVLRDLSKPTGTQIITYDLQNREYNLPGTLVSSTTNQFTTSSQRAAVDAHYNLGKVYDYFYQKFNRNSYDNKGGKIVSSVHYGSRYNNAAWIGDQMIYGDGDGSLFSPLSGSLDVTAHEMTHGVTQETANLNYENQPGALNESFSDVFGYFNDPEDWDIGEDITVSQPALRSLSNPTKYGQPDNFKNYKNLPNTDAGDYGGVHTNSGIPNKAAYNTITKIGVNKAEQIYYRALTVYLTPSSTFKDAKAALIQSARDLYGSQDAASVEAAWNAVGL

SEQ ID NO: 70912 - protein, 300 aa, Bacillus amyloliquefaciens
AATTGTGTTLKGKTVSLNISSESGKYVLRDLSKPTGTQIITYDLQNREYNLPGTLVSSTTNQFTTSSQRAAVDAHYNLGKVYDYFYQKFNRNSYDNKGGKIVSSVHYGSRYNNAAWIGDQMIYGDGDGSVFSPLSGSLDVTAHEMTHGVTQWTANLNYENQPGALNESFSDVFGYFNDTEDWDIGEDITVSQPALRSLSNPTKYGQPDNFKNYKNLPNTDAGDYGGVHTNSGIPNKAAYNTITKIGVNKAEQIYYRALTVYLTPSSTFKDAKAALIQSARDLYGSQDAASVEAAWNAVGL

SEQ ID NO: 70913 - protein, 300 aa, Bacillus amyloliquefaciens
AATTGTGTTLKGKTVSLNISSESGKYVLRDLSKPTGTQIITYDLQNREYNLPGTLVSSTTNQFTTSSQRAAVDAHYNLGKVYDYFYQKFNRNSYDNKGGKIVSSVHYGSRYNNAAWIGDQMIYGDGDGSLFSPLSGSLDVTAHEMTHGVTQWTANLNYENQPGALNESFSDVFGYFNDTEDWNIGEDITVSQPALRSLSNPTKYGQPDNFKNYKNLPNTDAGDYGGVHTNSGIPNKAAYNTITKIGVNKAEQIYYRALTVYLTPSSTFKDAKAALIQSARDLYGSQDAASVEAAWNAVGL

SEQ ID NO: 70914 - protein, 300 aa, Bacillus amyloliquefaciens
AATTGTGTTLKGKTVSLNISSESGKYVLRDLSKPTGTQIITYDLQNREYNLPGTLVSSTTNQFTTSSQRAAVDAHYNLGKVYDYFYQKFNRNSYDNKGGKIVSSVHYGSRYNNAAWIGDQMIYGDGDGSFFSPLSGSMDVTAHEMTHGVTQETANLNYENQPGALNESFSDVFGYFNDTEDWDIGEDITISQPALRSLSNPTKYGQPDNFKNYKNLPNTEAGDYGGVHTNSGIPNKAAYNTITKIGVNKAEQIYYRALTVYLTPNSTFKDAKAALIQSARDLYGSQDAASVEAAWNAVGL

SEQ ID NO: 70915 - protein, 300 aa, Bacillus amyloliquefaciens
AATTGTGTTLKGKTVSLNISSESGKYVLRDLSKPTGTQIITYDLQNREYNLPGTLVSSTTNQFTTSSQRAAVDAHYNLGKVYDYFYQKFNRNSYDNKGGKIVSSVHYGSRYNNAAWIGDQMIYGDGDGSIFSPLSGSMDVTAHEMTHGVTQETANLNYENQPGALNESFSDVFGYFNDTEDWDIGEDITVSQPALRSLSNPTKYGQPDNFKNYKNLPNTDAGDYGGVHTNSGIPNKAAYNTITKIGVNKAEQIYYRALTVYLTPSSTFKDAKAALIQSARDLYGSQDAASVEAAWNAVGL

SEQ ID NO: 70916 - protein, 300 aa, Bacillus amyloliquefaciens
AATTGTGTTLKGKTVSLNISSESGKYVLRDLSKPTGTQIITYDLQNREYNLPGTLVSSTTNQFTTQSQRAAVDAHYNLGKVYDYFYQKFNRNSYDNKGGKIVSSVHYGSRYNNAAWIGDQMIYGDGDGIFFSPLSGSMDVTAHEMTHGVTQETANLNYENQPGALNESFSDVFGYFNDTEDWDIGEDITVSQPALRSLSNPTKYGQPDNFKNYKNLPNTDAGDYGGVHTNSGIPNKAAYNTITKIGVNKAEQIYYRALTVYLTPSSTFKDAKAALIQSARDLYGSQDAASVEAAWNAVGL

SEQ ID NO: 70917 - protein, 300 aa, Bacillus amyloliquefaciens
AATTGTGTTLKGKTVSLNISSESGKYVLRDLSKPTGTQIITYDLQNREYNLPGTLVSSTTNQFTTSSQRAAVDAHYNLGKVYDYFYQKFNRNSYDNKGGKIVSSVHYGSRYNNAAWIGDQMIYGDGDGSFFSPLSGSMDVTAHEMTHGVTQETANLNYENQPGALNESFSDVFGYFNDTEDWDIGEDITISQPALRSLSNPTKYGQPDNFKNYKNLPNTDAGDYGGVHTNSGIPNKAAYNTITKIGVNKAEQIYYRALTVYLTPQSTFKDAKAALIQSARDLYGSQDAASVEAAWNAVGL

SEQ ID NO: 70918 - protein, 300 aa, Bacillus amyloliquefaciens
AATTGTGTTLKGKTVSLNISSESGKYVLRDLSKPTGTQIITYDLQNREYNLPGTLVSSTTNQFTTSSQRAAVDAHYNLGKVYDYFYQKFNRNSYDNKGGKIVSSVHYGSRYNNAAWIGDQMIYGDGDGSFFSPLSGSKDVTAHEMTHGVTQETANLNYENQPGALNESFSDVFGYFNDTEDWDIGEDITVSQPALRSLSNPTKYGQPDNFKNYKNLPNTDAGDYGGVHTNSGIPNKAAYNTITKIGVNKAEQIYYRALTVYLTPSSTFKDAKAALIQSARDLYGSQDAASVEAAWNAVGL

SEQ ID NO: 70919 - protein, 300 aa, Bacillus amyloliquefaciens
AATTGTGTTLKGKTVSLNISSESGKYVLRDLSKPTGTQIITYDLQNREYNLPGTLVSSTTNQFTTSSQRAAVDAHYNLGKVYDYFYQKFNRNSYDNKGGKIVSSVHYGSRYNNAAWIGDQMIYGDGDGSFFSPLSGSMDVTAHEMTHGVTQETANLNYENQPGALNESFSDVFGYFNDTEDWDIGEDITISQPALRSLSNPTKYGQPDNFKNYKNLPNTDAGDYGGVHTNSGIPNKAAYNTITKIGVNKAEQIYYRALTVYLTPNSTFKDAKAALIQSARDLYGSQDAASVEAAWNAVGL

SEQ ID NO: 70920 - protein, 300 aa, Bacillus amyloliquefaciens
AATTGTGTTLKGKTVSLNISSESGKYVLRDLSKPTGTQIITYDLQNREYNLPGTLVSSTTNQFTTSSQRAAVDAHYNLGKVYDYFYQKFNRNSYDNKGGKIVSSVHYGSRYNNAAWIGDQMIYGDGDGSFFSPLSGSLDVTAHEMTHGVTQMTANLNYENQPGALNESFSDVFGYFNDTEDWDIGEDITVSQPALRSLSNPTKYGQPDNFKNYKNLPNTDAGDYGGVHTNSGIPNKAAYNTITKIGVNKAEQIYYRALTVYLTPSSTFKDAKAALIQSARDLYGSQDAASVEAAWNAVGL

SEQ ID NO: 70921 - protein, 300 aa, Bacillus amyloliquefaciens
AATTGTGTTLKGKTVSLNISSESGKYVLRDLSKPTGTQIITYDLQNREYNLPGTLVSSTTNQFTTSSQRAAVDAHYNLGKVYDYFYQKFNRNSYDNKGGKIVSSVHYGSRYNNAAWIGDQMIYGDGDGSFFSPLSGSLDVTAHEMTHGVTQFTANLNYENQPGALNESFSDVFGYFNDTEDWDIGEDITVSQPALRSLSNPTKYGQPDNFKNYKNLPNTDAGDYGGVHTNSGIPNKAAYNTITKIGVNKAEQIYYRALTVYLTPSSTFKDAKAALIQSARDLYGSQDAASVEAAWNAVGL

SEQ ID NO: 70922 - protein, 299 aa, Bacillus licheniformis
ATTGTGTTLKGKTVSLNISSESGKYVLRDLSKPTGTQIITYDLQNREYNLPGTLVSSTTNQFTTSSQRAAVDAHYNLGKVYDYFYQKFNRNSYDNKGGKIVSSVHYGSRYNNAAWIGDQMIYGDGDGSFFSPLSGSMDVTAHEMTHGVTQETANLNYENQPGALNESFSDVFGYFNDTEDWDIGEDITVSQPALRSLSNPTKYGQPDNFKNYKNLPNTDAGDYGGVHTNSGIPNKAAYNTITKIGVNKAEQIYYRALTVYLTPSSTFKDAKAALIQSARDLYGSQDAASVEAAWNAVGL

SEQ ID NO: 70923 - protein, 299 aa, Bacillus amyloliquefaciens
AATTGTGTTLKGKTVSLNISSESGKYVLRDLSKPTGTQIITYDLQNREYNLPGTLVSSTTNQFTTSSQRAAVDAHYNLGKVYDYFYQKFNRNSYDNKGGKIVSSVHYGSRYNNAAWIGDQMIYGDGDGSFFSPLSGSMDVTAHEMTHGVTQETANLNYENQPGALNESFSDVFGYFNDTEDWDIGEDITISQPALRSLSNPTKYGQPDNFKNYKNLPNTDAGDYGGVHTNSGIPNKAAYNTITKIGVNKAEQIYYRALTVYLTPLTFKDAKAALIQSARDLYGSQDAASVEAAWNAVGL

SEQ ID NO: 70924 - protein, 219 aa, Bacillus amyloliquefaciens
AATTGTGTTLKGKTVSLNISSESGKYVLRDLSKPTGTQIITYDLQNREYNLPGTLVSSTTNQFTTSSQRAAVDAHYNLGKVYDYFYQKFNRNSYDNKGGKIVSSVHYGSRYNNAAWIGDQMIYGDGDGSFFSPLSGSMDVTAHEMTHGVTQETANLNYENQPGALNESFSDVFGYFNDTEDWDIGEDITVSQPALRSLSNPTKYGQPDNFKNYKNLPNT

SEQ ID NO: 70925 - protein, 300 aa, Bacillus amyloliquefaciens
AATTGTGTTLKGKTVSLNISSESGKYVLRDLSKPTGTQIITYDLQNREYNLPGTLVSSTTNQFTTSSQRAAVDAHYNLGKVYDYFYQKFNRNSYDNKGGKIVSSVHYGSRYNNAAWIGDQMIYGDGDGSFFSPLSGSLDVTAHEMTHGVTQWTANLNYENQPGALNESFSDVFGYFNDPEDWDIGEDITVSQPALRSLSNPTKYGQPDNFKNYKNLPNTDAGDYGGVHTNSGIPNKAAYNTITKIGVNKAEQIYYRALTVYLTPSSTFKDAKAALIQSARDLYGSQDAASVEAAWNAVGL

SEQ ID NO: 70926 - protein, 300 aa, Bacillus amyloliquefaciens
AATTGTGTTLKGKTVSLNISSESGKYVLRDLSKPTGTQIITYDLQNREYNLPGTLVSSTTNQFTTSSQRAAVDAHYNLGKVYDYFYQKFNRNSYDNKGGKIVSSVHYGSRYNNAAWIGDQMIYGDGDGSFFSPLSGSMDVTAHEMTHGVTQETANLNYENQPGALNESFSDVFGYFNDTEDWDIGEDITVSQPALRSLSNPTKYNQPDNFKNYKNLPNTDAGDYGGVHTNSGIPNKAAYNTITKIGVNKAEQIYYRALTVYLTPSSTFKDAKAALIQSARDLYGSQDAASVEAAWNAVGL

SEQ ID NO: 70927 - protein, 300 aa, Bacillus amyloliquefaciens
AATTGTGTTLKGKTVSLNISSESGKYVLRDLSKPTGTQIITYDLQNREYNLPGTLVSSTTNQFTTSSQRAAVDAHYNLGKVYDYFYQKFNRNSYDNKGGKIVSSVHYGSRYNNAAWIGHQMIYGDGDGSFFSPLSGSMDVTAHEMTHGVTQETANLNYENQPGALNESFSDVFGYFNDTEDWDIGEDITVSQPALRSLSNPTKYGQPDNFKNYKNLPNTDAGDYGGVHTNSGIPNKAAYNTITKIGVNKAEQIYYRALTVYLTPSSTFKDAKAALIQSARDLYGSQDAASVEAAWNAVGL

SEQ ID NO: 70928 - protein, 300 aa, Bacillus amyloliquefaciens
AATTGTGTTLKEKTVSLNISSESGKYVLRDLSKPTGTQIITYDLQNREYNLPGTLVSSTTNQFTTSSQRAAVDAHYNLGKVYDYFYQKFNRNSYDNKGGKIVSSVHYGSRYNNAAWIGDQMIYGDGDGSFFSPLSGSMDVTAHEMTHGVTQETANLNYENQPGALNESFSDVFGYFNDTEDWDIGEDITVSQPALRSLSNPTKYGQPDNFKNYKNLPNTDAGDYGGVHTNSGIPNKAAYNTITKIGVNKAEQIYYRALTVYLTPSSTFKDAKAALIQSARDLYGSQDAASVEAAWNAVGL

SEQ ID NO: 70929 - protein, 300 aa, Bacillus amyloliquefaciens
AATTGTGTTLKGKTVSLNISSESGKYVLRDLSKPTGTQIITYDLQNREYNLPGTLVSSTTNQFTTSSQRAAVDAHYNLGKVYDYFYQKFNRNSYDNKGGKIVSSVHYGSRYNNAAWIGDQMIYGDGDGSFFSPLSGSMDVTAHEMTHGVTQETANLNYENQPGALNESFSDVFGYFNDPEDWDIGEDITVSQPALRSLSNPTKYGQPDNFKNYKNLPNTDAGDYGGVHTNSGIPNKAAYNTITKIGVNKAEQIYYRALTVYLTPSSTFKDAKAALIQSARDLYGSQDAASVEAAWNAVGL

SEQ ID NO: 70930 - protein, 300 aa, Bacillus amyloliquefaciens
AATTGTGTTLKGKTVSLNISSESGKYVLRDLSKPTGTQIITYDLQNREYNLPGTLVSSTTNQFTTSSQRAAVDAHYNLGKVYDYFYQKFNRNSYDNKGGKIVSSVHYGSRYNNAAWIGDQMIYGDGDGSFFSPLSGSMDVTAHEMTHGVTQETANLNYENQPGALNESFSDVFGYFNDTEDWDIGEDITVSQPALRSLSNPTKYGQPDNFKNYKNYPNTDAGDYGGVHTNSGIPNKAAYNTITKIGVNKAEQIYYRALTVYLTPSSTFKDAKAALIQSARDLYGSQDAASVEAAWNAVGL

SEQ ID NO: 70931 - protein, 300 aa, Bacillus amyloliquefaciens
AATTGTGTTLKGKPVSLNISSESGKYVLRDLSKPTGTQIITYDLQNREYNLPGTLVSSTTNQFTTSSQRAAVDAHYNLGKVYDYFYQKFNRNSYDNKGGKIVSSVHYGSRYNNAAWIGDQMIYGDGDGSFFSPLSGSMDVTAHEMTHGVTQETANLNYENQPGALNESFSDVFGYFNDTEDWDIGEDITVSQPALRSLSNPTKYGQPDNFKNYKNLPNTDAGDYGGVHTNSGIPNKAAYNTITKIGVNKAEQIYYRALTVYLTPSSTFKDAKAALIQSARDLYGSQDAASVEAAWNAVGL

SEQ ID NO: 70932 - protein, 300 aa, Bacillus amyloliquefaciens
AATTGTGTTLKGKTVSLNISSESGKYVLRDLSKPTGTQIITYDLQNREYNLPGTLVSSTTNQFTTQSQRAAVDAHYNLGKVYDYFYQKFNRNSYDNKGGKIVSSVHYGSRYNNAAWIGDQMIYGDGDGQFFSPLSGSMDVTAHEMTHGVTQETANLNYENQPGALNESFSDVFGYFNDTEDWDIGEDITVSQPALRSLSNPTKYGQPDNFKNYKNLPNTDAGDYGGVHTNSGIPNKAAYNTITKIGVNKAEQIYYRALTVYLTPSSTFKDAKAALIQSARDLYGSQDAASVEAAWNAVGL

SEQ ID NO: 70933 - protein, 300 aa, Bacillus amyloliquefaciens
AATTGTGTTLKGKTVSLNISSESHKYVLRDLSKPTGTQIITYDLQNREYNLPGTLVSSTTNQFTTSSQRAAVDAHYNLGKVYDYFYQKFNRNSYDNKGGKIVSSVHYGSRYNNAAWIGDQMIYGDGDGSFFSPLSGSMDVTAHEMTHGVTQETANLNYENQPGALNESFSDVFGYFNDTEDWDIGEDITVSQPALRSLSNPTKYGQPDNFKNYKNLPNTDAGDYGGVHTNSGIPNKAAYNTITKIGVNKAEQIYYRALTVYLTPSSTFKDAKAALIQSARDLYGSQDAASVEAAWNAVGL

SEQ ID NO: 70934 - protein, 300 aa, Bacillus amyloliquefaciens
AATTGTGTTLKGKTVSLNISSESGKYVLRDLSKPTGTQIITYDLQNREYNLPGTLVSSTTNQFTTSSQRAAVDAHYNLGKVYDYFYQKFNRNSYDNKGGKIVSSVHYGSRYNNAAWIGDQMIYGDGDGSFFSPLSGSMDVTAHEMTHGVTQRTANLNYENQPGALNESFSDVFGYFNDTEDWDIGEDITVSQPALRSLSNPTKYGQPDNFKNYKNLPNTDAGDYGGVHTNSGIPNKAAYNTITKIGVNKAEQIYYRALTVYLTPSSTFKDAKAALIQSARDLYGSQDAASVEAAWNAVGL

SEQ ID NO: 70935 - protein, 300 aa, Bacillus amyloliquefaciens
AATTGTGTTLKGKTVSLNISSESGKYVLRDLSKPTGTQIITYDLQNREYNLPGTLVSSTTNQFTTSSQRAAVDAHYNLGKVYDYFYQKFKRNSYDNKGGKIVSSVHYGSRYNNAAWIGDQMIYGDGDGSFFSPLSGSMDVTAHEMTHGVTQETANLNYENQPGALNESFSDVFGYFNDTEDWDIGEDITVSQPALRSLSNPTKYGQPDNFKNYKNLPNTDAGDYGGVHTNSGIPNKAAYNTITKIGVNKAEQIYYRALTVYLTPSSTFKDAKAALIQSARDLYGSQDAASVEAAWNAVGL

SEQ ID NO: 70936 - protein, 300 aa, Bacillus amyloliquefaciens
AATTGTGTTLKIKTVSLNISSESGKYVLRDLSKPTGTQIITYDLQNREYNLPGTLVSSTTNQFTTSSQRAAVDAHYNLGKVYDYFYQKFNRNSYDNKGGKIVSSVHYGSRYNNAAWIGDQMIYGDGDGSFFSPLSGSMDVTAHEMTHGVTQETANLNYENQPGALNESFSDVFGYFNDTEDWDIGEDITVSQPALRSLSNPTKYGQPDNFKNYKNLPNTDAGDYGGVHTNSGIPNKAAYNTITKIGVNKAEQIYYRALTVYLTPSSTFKDAKAALIQSARDLYGSQDAASVEAAWNAVGL

SEQ ID NO: 70937 - protein, 300 aa, Bacillus amyloliquefaciens
AATTGTGTTLKGKTVSLNISSESGKYVLRDLSKPTGTQIITYDLQNREYNLPGTLVSSTTNQFTTSSQRAAVDAHYNLGKVYDYFYQKFNRNSYDNKGGKIVSSVHYGSRYNNAAWIGDQMIYGDGDGSVFSPLSGSMDVTAHEMTHGVTQFTANLNYENQPGALNESFSDVFGYFNDTEDWDIGEDITVSQPALRSLSNPTKYGQPDNFKNYKNLPNTDAGDYGGVHTNSGIPNKAAYNTITKIGVNKAEQIYYRALTVYLTPSSTFKDAKAALIQSARDLYGSQDAASVEAAWNAVGL

SEQ ID NO: 70938 - protein, 300 aa, Bacillus amyloliquefaciens
AATLGTGTTLKGKTVSLNISSESGKYVLRDLSKPTGTQIITYDLQNREYNLPGTLVSSTTNQFTTSSQRAAVDAHYNLGKVYDYFYQKFNRNSYDNKGGKIVSSVHYGSRYNNAAWIGDQMIYGDGDGSFFSPLSGSMDVTAHEMTHGVTQETANLNYENQPGALNESFSDVFGYFNDTEDWDIGEDITVSQPALRSLSNPTKYGQPDNFKNYKNLPNTDAGDYGGVHTNSGIPNKAAYNTITKIGVNKAEQIYYRALTVYLTPSSTFKDAKAALIQSARDLYGSQDAASVEAAWNAVGL

SEQ ID NO: 70939 - protein, 300 aa, Bacillus amyloliquefaciens
AATTGTGTTLKGKTVSLNISSESGKYVLRDLSKPTGTQIITYDLQNREYNLPGTLVSSTTNQFTTSSQRAAVDAHYNLGKVYDYFYQKFNRNSYDNKGGKIVSSVHYGSRYNNAAWIGDQMIYGDGDGSLFSPLSGSMDVTAHEMTHGVTQFTANLNYENQPGALNESFSDVFGYFNDPEDWDIGEDITVSQPALRSLSNPTKYGQPDNFKNYKNLPNTDAGDYGGVHTNSGIPNKAAYNTITKIGVNKAEQIYYRALTVYLTPSSTFKDAKAALIQSARDLYGSQDAASVEAAWNAVGL

SEQ ID NO: 70940 - protein, 300 aa, Bacillus amyloliquefaciens
AATTGTGTTLKGKTVSLNISSESGKYVLRDLSKPTGTQIITYDLQNREYNLPGTLVSSTTNQFTTSSQRAAVDAHYNLGKVYDYFYQKFNRNSYDNKGGKIVSSVHYGSRYNNAAWIGEQMIYGDGDGSFFSPLSGSMDVTAHEMTHGVTQETANLNYENQPGALNESFSDVFGYFNDTEDWDIGEDITVSQPALRSLSNPTKYGQPDNFKNYKNLPNTDAGDYGGVHTNSGIPNKAAYNTITKIGVNKAEQIYYRALTVYLTPSSTFKDAKAALIQSARDLYGSQDAASVEAAWNAVGL

SEQ ID NO: 70941 - protein, 300 aa, Bacillus amyloliquefaciens
AATTGTGTTLKGKTVSLNISSESGKYVLRDLSKPTGTQIITYDLQNREYNLPGTLVSSTTNQFTTSSQRAAVDAHYNLGKVYDYFYQKFNRNSYDNKGGKIVSSVHYGSRYNNAAWIGDQMIYGDGDGSFFSPLSGSMDVTAHEMTHGVTQETANLNYENQPGALNESFSDVFGYFNDTEDWDIGEDITLSQPALRSLSNPTKYGQPDNFKNYKNLPNTEAGDYGGVHTNSGIPNKAAYNTITKIGVNKAEQIYYRALTVYLTPNSTFKDAKAALIQSARDLYGSQDAASVEAAWNAVGL

SEQ ID NO: 70942 - protein, 300 aa, Bacillus amyloliquefaciens
AATTGTGTTLKGKFVSLNISSESGKYVLRDLSKPTGTQIITYDLQNREYNLPGTLVSSTTNQFTTSSQRAAVDAHYNLGKVYDYFYQKFNRNSYDNKGGKIVSSVHYGSRYNNAAWIGDQMIYGDGDGSFFSPLSGSMDVTAHEMTHGVTQETANLNYENQPGALNESFSDVFGYFNDTEDWDIGEDITVSQPALRSLSNPTKYGQPDNFKNYKNLPNTDAGDYGGVHTNSGIPNKAAYNTITKIGVNKAEQIYYRALTVYLTPSSTFKDAKAALIQSARDLYGSQDAASVEAAWNAVGL

SEQ ID NO: 70943 - protein, 300 aa, Bacillus amyloliquefaciens
AATTGTGTTLKGKTVSLNISSESGKYVLRDLSKPTGTQIITYDLQNREYNLPGTLVSSTTNQFTTSSQRAAVDAHYNLGKVYDYFYQKFNRNSYDNKGGKIVSSVHYGSRYNNAAWIGDQMIYGDGDWSFFSPLSGSMDVTAHEMTHGVTQETANLNYENQPGALNESFSDVFGYFNDTEDWDIGEDITVSQPALRSLSNPTKYGQPDNFKNYKNLPNTDAGDYGGVHTNSGIPNKAAYNTITKIGVNKAEQIYYRALTVYLTPSSTFKDAKAALIQSARDLYGSQDAASVEAAWNAVGL

SEQ ID NO: 70944 - protein, 300 aa, Bacillus amyloliquefaciens
AATTGTGTTLKGKTVSLNISSESGKYVLRDLSKPTGTQIITYDLQNREYNLPGTLVSSTTNQFTTSSQRAAVDAHYNLGKVYDYFYQKFNRNSYDNKGGKIVSSVHYGSRYNNAAWIGDQMIYGDGDGSFFSPLSGSMDVTAHEMTHGVTQETANLNYENQPGALNESFSDVFGYFNDTEDWDIGEDITVSQPALRSLSNPTKYLQPDNFKNYKNLPNTDAGDYGGVHTNSGIPNKAAYNTITKIGVNKAEQIYYRALTVYLTPSSTFKDAKAALIQSARDLYGSQDAASVEAAWNAVGL

SEQ ID NO: 70945 - protein, 300 aa, Bacillus amyloliquefaciens
AATTGTGTTLKGKTVSLNISSESGKYVLRDLSKPTGTQIITYDLQNREYNLPGQLVSSTTNQFTTSSQRAAVDAHYNLGKVYDYFYQKFNRNSYDNKGGKIVSSVHYGSRYNNAAWIGDQMIYGDGDGSFFSPLSGSMDVTAHEMTHGVTQETANLNYENQPGALNESFSDVFGYFNDTEDWDIGEDITVSQPALRSLSNPTKYGQPDNFKNYKNLPNTDAGDYGGVHTNSGIPNKAAYNTITKIGVNKAEQIYYRALTVYLTPSSTFKDAKAALIQSARDLYGSQDAASVEAAWNAVGL

SEQ ID NO: 70946 - protein, 300 aa, Bacillus amyloliquefaciens
AATTGTGTTLKGKTVSLNISSESGKYVLRDLSKPTGTQIITYDLQNREYNLPGTLVSSWTNQFTTQSQRAAVDAHYNLGKVYDYFYQKFNRNSYDNKGGKIVSSVHYGSRYNNAAWIGDQMIYGDGDGIFFSPLSGSMDVTAHEMTHGVTQETANLNYENQPGALNESFSDVFGYFNDTEDWDIGEDITVSQPALRSLSNPTKYGQPDNFKNYKNLPNTDAGDYGGVHTNSGIPNKAAYNTITKIGVNKAEQIYYRALTVYLTPSSTFKDAKAALIQSARDLYGSQDAASVEAAWNAVGL

SEQ ID NO: 70947 - protein, 300 aa, Bacillus amyloliquefaciens
AATTGTGTTLKGKTVSLNISSESGKYVLRDLSKPTGTQIITYDLQNREFNLPGTLVSSTTNQFTTSSQRAAVDAHYNLGKVYDYFYQKFNRNSYDNKGGKIVSSVHYGSRYNNAAWIGDQMIYGDGDGSFFSPLSGSMDVTAHEMTHGVTQETANLNYENQPGALNESFSDVFGYFNDTEDWDIGEDITVSQPALRSLSNPTKYGQPDNFKNYKNLPNTDAGDYGGVHTNSGIPNKAAYNTITKIGVNKAEQIYYRALTVYLTPSSTFKDAKAALIQSARDLYGSQDAASVEAAWNAVGL

SEQ ID NO: 70948 - protein, 300 aa, Bacillus amyloliquefaciens
AATTGTGTTLKGKTVSLNISSEIGKYVLRDLSKPTGTQIITYDLQNREYNLPGTLVSSTTNQFTTSSQRAAVDAHYNLGKVYDYFYQKFNRNSYDNKGGKIVSSVHYGSRYNNAAWIGDQMIYGDGDGSFFSPLSGSMDVTAHEMTHGVTQETANLNYENQPGALNESFSDVFGYFNDTEDWDIGEDITVSQPALRSLSNPTKYGQPDNFKNYKNLPNTDAGDYGGVHTNSGIPNKAAYNTITKIGVNKAEQIYYRALTVYLTPSSTFKDAKAALIQSARDLYGSQDAASVEAAWNAVGL

SEQ ID NO: 70949 - protein, 300 aa, Bacillus amyloliquefaciens
AATTGTGTTLKGKTVSLNISSESGKYVLRDLSKPTGTQIITYDLQNREYNLPGTLVSSTTNQFTTSSQRAAVDAHYNLGKVYDYFYHKFNRNSYDNKGGKIVSSVHYGSRYNNAAWIGDQMIYGDGDGSFFSPLSGSMDVTAHEMTHGVTQETANLNYENQPGALNESFSDVFGYFNDTEDWDIGEDITVSQPALRSLSNPTKYGQPDNFKNYKNLPNTDAGDYGGVHTNSGIPNKAAYNTITKIGVNKAEQIYYRALTVYLTPSSTFKDAKAALIQSARDLYGSQDAASVEAAWNAVGL

SEQ ID NO: 70950 - protein, 300 aa, Bacillus amyloliquefaciens
AATTGTGTTLKGKTVSLNISSESGKYVLRDLSKPTGTQIITYDLQNREYNLPGTLVSSTTNQFTTSSQRAAVDAHYNLGKVYDYFYQKFNRNSYDNKGGKIVSSVHYGSRYNNAAWIGDQMIYGDGDGSFFSPLSGSMDVTAHEMTHGVTQETANLNYENQPGALNESFSDVFGYFNDTEDWDIGEDITVQQPALRSLSNPTKYGQPDNFKNYKNLPNTDAGDYGGVHTNSGIPNKAAYNTITKIGVNKAEQIYYRALTVYLTPSSTFKDAKAALIQSARDLYGSQDAASVEAAWNAVGL

SEQ ID NO: 70951 - protein, 300 aa, Bacillus amyloliquefaciens
AATTGTGTTLKGKTVSLNISSESGKYVLRDLSKPTGTQIITYDLQNREYNLPGTLVSSTTNQFTTSSQRAAVDAHYNLGKVYDYFYQKFNRNSYDNKGGKIVSSVHYGSRYNNAAWIGDQMIYGDGDGSQFSPLSGSMDVTAHEMTHGVTQETANLNYENQPGALNESFSDVFGYFNDTEDWDIGEDITVSQPALRSLSNPTKYGQPDNFKNYKNLPNTDAGDRGGVHTNSGIPNKAAYNTITKIGVNKAEQIYYRALTVYLTPSSTFKDAKAALIQSARDLYGSQDAASVEAAWNAVGL

SEQ ID NO: 70952 - protein, 300 aa, Bacillus amyloliquefaciens
AATTGTGTTLKGKTVSLNISSESGKYVLRDLSKPTGTQIITYDLQNREYNLPGTLVSSTTNQFTTSSQRAAVDAHYNLGKVYDYFYQKFNRNSYDNKGGKIVSSVHYGSRYNNAAWIGDQMIYGDGDQSFFSPLSGSMDVTAHEMTHGVTQETANLNYENQPGALNESFSDVFGYFNDTEDWDIGEDITVSQPALRSLSNPTKYGQPDNFKNYKNLPNTDAGDYGGVHTNSGIPNKAAYNTITKIGVNKAEQIYYRALTVYLTPSSTFKDAKAALIQSARDLYGSQDAASVEAAWNAVGL

SEQ ID NO: 70953 - protein, 300 aa, Bacillus amyloliquefaciens
AATTGTGTTLKGKTVSLNISSESGKYVLRDLSKPTGTQIITYDLQNREYNLPGTLVSSTTNQFTTSSQRAAVDAHYNLGKVYDYFYQKFNRNSYDNKGGKIVSSVHYGSRYNNAAWIGDQMIYGDGDGSFFSPLSGSMDVTAHEMTHGVTQETANLNYENQPGALNESFSDVFGYFNDTEDWDIGEDITVSQPALRSLSNPTKYGQPDNFKNYKNLPNTDAHDYGGVHTNSGIPNKAAYNTITKIGVNKAEQIYYRALTVYLTPSSTFKDAKAALIQSARDLYGSQDAASVEAAWNAVGL

SEQ ID NO: 70954 - protein, 300 aa, Bacillus amyloliquefaciens
AATTGTGTTLKGKTVSLNISSESGKYVLRDLSKPTGTQIITYDLQNREYNLPGTLVSSTTNQFTTSSQRAAVDAHYNLGKVYDYFYQKFNRNSYDNKGGKIVSSVHYGSRYNNAAWIGDQMIYGDGDNSFFSPLSGSMDVTAHEMTHGVTQETANLNYENQPGALNESFSDVFGYFNDTEDWDIGEDITVSQPALRSLSNPTKYGQPDNFKNYKNLPNTDAGDYGGVHTNSGIPNKAAYNTITKIGVNKAEQIYYRALTVYLTPSSTFKDAKAALIQSARDLYGSQDAASVEAAWNAVGL

SEQ ID NO: 70955 - protein, 300 aa, Bacillus amyloliquefaciens
AATTGTGTTLKGETVSLNISSESGKYVLRDLSKPTGTQIITYDLQNREYNLPGTLVSSTTNQFTTSSQRAAVDAHYNLGKVYDYFYQKFNRNSYDNKGGKIVSSVHYGSRYNNAAWIGDQMIYGDGDGSFFSPLSGSMDVTAHEMTHGVTQETANLNYENQPGALNESFSDVFGYFNDTEDWDIGEDITVSQPALRSLSNPTKYGQPDNFKNYKNLPNTDAGDYGGVHTNSGIPNKAAYNTITKIGVNKAEQIYYRALTVYLTPSSTFKDAKAALIQSARDLYGSQDAASVEAAWNAVGL

SEQ ID NO: 70956 - protein, 300 aa, Bacillus amyloliquefaciens
AATTGTGTTLKGKMVSLNISSESGKYVLRDLSKPTGTQIITYDLQNREYNLPGTLVSSTTNQFTTSSQRAAVDAHYNLGKVYDYFYQKFNRNSYDNKGGKIVSSVHYGSRYNNAAWIGDQMIYGDGDGSFFSPLSGSMDVTAHEMTHGVTQETANLNYENQPGALNESFSDVFGYFNDTEDWDIGEDITVSQPALRSLSNPTKYGQPDNFKNYKNLPNTDAGDYGGVHTNSGIPNKAAYNTITKIGVNKAEQIYYRALTVYLTPSSTFKDAKAALIQSARDLYGSQDAASVEAAWNAVGL

SEQ ID NO: 70957 - protein, 300 aa, Bacillus amyloliquefaciens
AATTGTGTTLKGKTVSLNISSESGKYVLRDLSKPTGTQIITYDLQNREYNLPGTLVSSTTNQFTTSSQRAAVDAHYNLGKVYDYFYQKFNRNSYDNKGGKIVSSVHYGSRYNNAAWIGSQMIYGDGDGSFFSPLSGSMDVTAHEMTHGVTQETANLNYENQPGALNESFSDVFGYFNDTEDWDIGEDITVSQPALRSLSNPTKYGQPDNFKNYKNLPNTDAGDYGGVHTNSGIPNKAAYNTITKIGVNKAEQIYYRALTVYLTPSSTFKDAKAALIQSARDLYGSQDAASVEAAWNAVGL

SEQ ID NO: 70958 - protein, 300 aa, Bacillus amyloliquefaciens
AATTGTGTTLKGKTVSLNISSESGKYVLRDLSKPTGTQIITYDLQNREYNLPGYLVSSTTNQFTTSSQRAAVDAHYNLGKVYDYFYQKFNRNSYDNKGGKIVSSVHYGSRYNNAAWIGDQMIYGDGDGSFFSPLSGSMDVTAHEMTHGVTQETANLNYENQPGALNESFSDVFGYFNDTEDWDIGEDITVSQPALRSLSNPTKYGQPDNFKNYKNLPNTDAGDYGGVHTNSGIPNKAAYNTITKIGVNKAEQIYYRALTVYLTPSSTFKDAKAALIQSARDLYGSQDAASVEAAWNAVGL

SEQ ID NO: 70959 - protein, 300 aa, Bacillus amyloliquefaciens
AATTGTGTTLKGKTVSLNISSESGKYVLRDLSKPTGTQIITYDLQNREYNLPGTLVSSTTNQFTTSSQRAAVDAHYNLGKVYDYFYQKFNRNSYDNKGGKIVSSVHYGSRYNNAAWIGDQMIYGDGDGSFFSPLSGSMDVTAHEMTHGVTQETANLNYENQPGALNESFSDVFGYFNDTEDWDIGEDITVLQPALRSLSNPTKYGQPDNFKNYKNLPNTDAGDYGGVHTNSGIPNKAAYNTITKIGVNKAEQIYYRALTVYLTPSSTFKDAKAALIQSARDLYGSQDAASVEAAWNAVGL

SEQ ID NO: 70960 - protein, 300 aa, Bacillus amyloliquefaciens
AATTGTGTTLKGKTVSLNISSESGKYVLRDLSKPTGTQIITYDLQNREYNLPGTLVSSTTNQFTTSSQRAAVDAHYNLGKVYDYFYQKFFRNSYDNKGGKIVSSVHYGSRYNNAAWIGDQMIYGDGDGSFFSPLSGSMDVTAHEMTHGVTQETANLNYENQPGALNESFSDVFGYFNDTEDWDIGEDITVSQPALRSLSNPTKYGQPDNFKNYKNLPNTDAGDYGGVHTNSGIPNKAAYNTITKIGVNKAEQIYYRALTVYLTPSSTFKDAKAALIQSARDLYGSQDAASVEAAWNAVGL

SEQ ID NO: 70961 - protein, 300 aa, Bacillus amyloliquefaciens
AATTGTGTTLKGKTVSLNISSESGKYVLRDLSKPTGTQIITYDLQNREYNLPGTLVSSWTNQFTTSSQRAAVDAHYNLGKVYDYFYQKFNRNSYDNKGGKIVSSVHYGSRYNNAAWIGDQMIYGDGDGVFFSPLSGSMDVTAHEMTHGVTQETANLNYENQPGALNESFSDVFGYFNDTEDWDIGEDITVSQPALRSLSNPTKYGQPDNFKNYKNLPNTDAGDYGGVHTNSGIPNKAAYNTITKIGVNKAEQIYYRALTVYLTPSSTFKDAKAALIQSARDLYGSQDAASVEAAWNAVGL

SEQ ID NO: 70962 - protein, 300 aa, Bacillus amyloliquefaciens
AATTGTGTTLKRKTVSLNISSESGKYVLRDLSKPTGTQIITYDLQNREYNLPGTLVSSTTNQFTTSSQRAAVDAHYNLGKVYDYFYQKFNRNSYDNKGGKIVSSVHYGSRYNNAAWIGDQMIYGDGDGSFFSPLSGSMDVTAHEMTHGVTQETANLNYENQPGALNESFSDVFGYFNDTEDWDIGEDITVSQPALRSLSNPTKYGQPDNFKNYKNLPNTDAGDYGGVHTNSGIPNKAAYNTITKIGVNKAEQIYYRALTVYLTPSSTFKDAKAALIQSARDLYGSQDAASVEAAWNAVGL

SEQ ID NO: 70963 - protein, 300 aa, Bacillus amyloliquefaciens
AATTGTGTTLKGKTVSLNISSESGKYVLRDLSKPTGTQIITYDLQNREYNLPGTLVSSTTNQFTTSSQRAAVDAHYNLGKVYDYFYLKFNRNSYDNKGGKIVSSVHYGSRYNNAAWIGDQMIYGDGDGSFFSPLSGSMDVTAHEMTHGVTQETANLNYENQPGALNESFSDVFGYFNDTEDWDIGEDITVSQPALRSLSNPTKYGQPDNFKNYKNLPNTDAGDYGGVHTNSGIPNKAAYNTITKIGVNKAEQIYYRALTVYLTPSSTFKDAKAALIQSARDLYGSQDAASVEAAWNAVGL

SEQ ID NO: 70964 - protein, 300 aa, Bacillus amyloliquefaciens
AATTGTGTTLKGKTVSLNISSESGKYVLRDLSKPTGTQIITYDLQNREYMLPGTLVSSTTNQFTTSSQRAAVDAHYNLGKVYDYFYQKFNRNSYDNKGGKIVSSVHYGSRYNNAAWIGDQMIYGDGDGSFFSPLSGSMDVTAHEMTHGVTQETANLNYENQPGALNESFSDVFGYFNDTEDWDIGEDITVSQPALRSLSNPTKYGQPDNFKNYKNLPNTDAGDYGGVHTNSGIPNKAAYNTITKIGVNKAEQIYYRALTVYLTPSSTFKDAKAALIQSARDLYGSQDAASVEAAWNAVGL

SEQ ID NO: 70965 - protein, 300 aa, Bacillus amyloliquefaciens
AATTGTGTTLKGKTVSLNISSESGKYVLRDLSKPTGTQIITYDLQNREYNLPGTLVSSWTNQFTTNSQRAAVDAHYNLGKVYDYFYQKFNRNSYDNKGGKIVSSVHYGSRYNNAAWIGDQMIYGDGDGIFFSPLSGSMDVTAHEMTHGVTQETANLNYENQPGALNESFSDVFGYFNDTEDWDIGEDITVSQPALRSLSNPTKYGQPDNFKNYKNLPNTDAGDYGGVHTNSGIPNKAAYNTITKIGVNKAEQIYYRALTVYLTPSSTFKDAKAALIQSARDLYGSQDAASVEAAWNAVGL

SEQ ID NO: 70966 - protein, 300 aa, Bacillus amyloliquefaciens
AATTGTGTTLKGKTVSLNISSESGKYVLRDLSKPTGTQIITYDLQNREYNLPGTLVSSTTNQFTTSSQRAAVDAHYNLGKVYDYFYQKFNRNSYDNKGGKIVSSVHYGSRYNNAAWIGDQMIYGDGDGSFFSPLSGSMDVTAHEMTHGVTQETANLNYENQPGALNESFSDVFGYFNDTEDWDIGEDITVSQPALRSLSNPTKYGQPDNFKNYKNLPNTDKGDYGGVHTNSGIPNKAAYNTITKIGVNKAEQIYYRALTVYLTPSSTFKDAKAALIQSARDLYGSQDAASVEAAWNAVGL

SEQ ID NO: 70967 - protein, 300 aa, Bacillus amyloliquefaciens
AATTGTGTTLKGKTVSLNISSESLKYVLRDLSKPTGTQIITYDLQNREYNLPGTLVSSTTNQFTTSSQRAAVDAHYNLGKVYDYFYQKFNRNSYDNKGGKIVSSVHYGSRYNNAAWIGDQMIYGDGDGSFFSPLSGSMDVTAHEMTHGVTQETANLNYENQPGALNESFSDVFGYFNDTEDWDIGEDITVSQPALRSLSNPTKYGQPDNFKNYKNLPNTDAGDYGGVHTNSGIPNKAAYNTITKIGVNKAEQIYYRALTVYLTPSSTFKDAKAALIQSARDLYGSQDAASVEAAWNAVGL

SEQ ID NO: 70968 - protein, 300 aa, Bacillus amyloliquefaciens
AATTGTGTTLKGKTVSLNISSESGKYVLRDLSKPTGTQIITYDLQNREYNLPGTLVSSTTNQFTTSSQRAAVDAHYNLGKVYDYFYQKFNRNSYDNKGGKIVSSVHYGSRYNNAAWIGDQMIYGDGDGSFFSPLSGSMDVTAHEMTHGVTQETANLNYENQPGALNESFSDVFGYFNDTEDWDIGEDITVIQPALRSLSNPTKYGQPDNFKNYKNLPNTDAGDYGGVHTNSGIPNKAAYNTITKIGVNKAEQIYYRALTVYLTPSSTFKDAKAALIQSARDLYGSQDAASVEAAWNAVGL

SEQ ID NO: 70969 - protein, 300 aa, Bacillus amyloliquefaciens
AATTGTGTTLKGKTVSLNISSESGKYVLRDLSKPTGTQIITYDLQNREYNLPGTLVSSTTNQFTTSSQRAAVDAHYNLGKVYDYFYQKFNRNSYDNKGGKIVSSVHYGSRYNNAAWIGDQMIYGDGDGSFFSPLSGSMDVTAHEMTHGVTQWTANLNYENQPGALNESFSDVFGYFNDTEDWDIGEDITVSQPALRSLSNPTKYGQPDNFKNYKNLPNTDAGDYGGVHTNSGIPNKAAYNTITKIGVNKAEQIYYRALTVYLTPSSTFKDAKAALIQSARDLYGSQDAASVEAAWNAVGL

SEQ ID NO: 70970 - protein, 300 aa, Bacillus amyloliquefaciens
AATTGTGTTLKGKTVSLNISSESGKYVLRDLSKPTGTQIITYDLQNREYNLPGTLVSSTTNQFTTSSQRAAVDAHYNLGKVYDYFYQKFNRNSYDNKGGKIVSSVHYGSRYNNAAWIGDQMIYGDGDGSFFSPLSGSMDVTAHEMTHGVTQETANLNYENQPGALNESFSDVFGYFNDTEDWDIGEDITLSQPALRSLSNPTKYGQPDNFKNYKNLPNTDAGDYGGVHTNSGIPNKAAYNTITKIGVNKAEQIYYRALTVYLTPNSTFKDAKAALIQSARDLYGSQDAASVEAAWNAVGL

SEQ ID NO: 70971 - protein, 300 aa, Bacillus amyloliquefaciens
AATTGTGTTLKGKTVSLNISSESGKYVLRDLSKPTGTQIITYDLQNREYNLPGTLVSSTTNQFTTSSQRAAVDAHYNLGKVYDYFYQKFNRNSYDNKGGKIVSSVHYGSRYNNAAWIGDQMIYGDGDGSFFSPLSGSMDVTAHEMTHGVTQETANLNYENQPGALNESFSDVFGYFNDTEDWDIGEDITVHQPALRSLSNPTKYGQPDNFKNYKNLPNTDAGDYGGVHTNSGIPNKAAYNTITKIGVNKAEQIYYRALTVYLTPSSTFKDAKAALIQSARDLYGSQDAASVEAAWNAVGL

SEQ ID NO: 70972 - protein, 300 aa, Bacillus amyloliquefaciens
AATTGTGTTLKGKTVSLNISSESGKYVLRDLSKPTGTQIITYDLQNREYNLPGTLVSSTTNQFTTSSQRAAVDAHYNLGKVYDYFYQKFNRNSYDNKGGKIVSSVHYGSRYNNAAWIGDQMIYGDGDGSFFSPLSGSMDVTAHEMTHGVTQFTANLNYENQPGALNESFSDVFGYFNDTEDWDIGEDITVSQPALRSLSNPTKYGQPDNFKNYKNLPNTDAGDYGGVHTNSGIPNKAAYNTITKIGVNKAEQIYYRALTVYLTPSSTFKDAKAALIQSARDLYGSQDAASVEAAWNAVGL

SEQ ID NO: 70973 - protein, 300 aa, Bacillus amyloliquefaciens
AATTGTGTTLKGKTVSLNISSESGKYVLRDLSKPTGTQIITYDLQNREYNLPGTLVSSTTNQFTTSSQRAAVDAHYNLGKVYDYFYQKFNRNSYDNKGGKIVSSVHYGSRYNNAAWIGDQMIYGDGDGSFFSPLSGSMDVTAHEMTHGVTQETANLNYENQPGALNESFSDVFGYFNDTEDWDIGEDITVSQPALRSLSNPTKYGQPDNFKNYKNLPNTDAGDYGGVHTNSGIPNKAAYNTITSIGVNKAEQIYYRALTVYLTPSSTFKDAKAALIQSARDLYGSQDAASVEAAWNAVGL

SEQ ID NO: 70974 - protein, 300 aa, Bacillus amyloliquefaciens
AATTGTGTTLKGKTVSLNISSESGKYVLRDLSKPTGTQIITYDLQNREYNLPGNLVSSTTNQFTTSSQRAAVDAHYNLGKVYDYFYQKFNRNSYDNKGGKIVSSVHYGSRYNNAAWIGDQMIYGDGDGSFFSPLSGSMDVTAHEMTHGVTQETANLNYENQPGALNESFSDVFGYFNDTEDWDIGEDITVSQPALRSLSNPTKYGQPDNFKNYKNLPNTDAGDYGGVHTNSGIPNKAAYNTITKIGVNKAEQIYYRALTVYLTPSSTFKDAKAALIQSARDLYGSQDAASVEAAWNAVGL

SEQ ID NO: 70975 - protein, 300 aa, Bacillus amyloliquefaciens
AATTGTGTTLKGKTVSLNISSESGKYVLRDLSKPTGTQIITYDLQNREYNLPGTLVSSTTNQFTTSSQRAAVDAHYNLGKVYDYFYQKFLRNSYDNKGGKIVSSVHYGSRYNNAAWIGDQMIYGDGDGSFFSPLSGSMDVTAHEMTHGVTQETANLNYENQPGALNESFSDVFGYFNDTEDWDIGEDITVSQPALRSLSNPTKYGQPDNFKNYKNLPNTDAGDYGGVHTNSGIPNKAAYNTITKIGVNKAEQIYYRALTVYLTPSSTFKDAKAALIQSARDLYGSQDAASVEAAWNAVGL

SEQ ID NO: 70976 - protein, 300 aa, Bacillus amyloliquefaciens
AATTGTGTTLKGKTVSLNISSESWKYVLRDLSKPTGTQIITYDLQNREYNLPGTLVSSTTNQFTTSSQRAAVDAHYNLGKVYDYFYQKFNRNSYDNKGGKIVSSVHYGSRYNNAAWIGDQMIYGDGDGSFFSPLSGSMDVTAHEMTHGVTQETANLNYENQPGALNESFSDVFGYFNDTEDWDIGEDITVSQPALRSLSNPTKYGQPDNFKNYKNLPNTDAGDYGGVHTNSGIPNKAAYNTITKIGVNKAEQIYYRALTVYLTPSSTFKDAKAALIQSARDLYGSQDAASVEAAWNAVGL

SEQ ID NO: 70977 - protein, 300 aa, Bacillus amyloliquefaciens
AATTGTGTTLKGKTVSLNISSESGKYVLRDLSKPTGTQIITYDLQNREYNLPGTLVSSTTNQFTTSSQRAAVDAHYNLGKVYDYFYQKFNRNSYDNKGGKIVSSVHYGSRYNNAAWIGDQMIYGDGDGSVFSPLSGSMDVTAHEMTHGVTQWTANLNYENQPGALNESFSDVFGYFNDTEDWDIGEDITVSQPALRSLSNPTKYGQPDNFKNYKNLPNTDAGDYGGVHTNSGIPNKAAYNTITKIGVNKAEQIYYRALTVYLTPSSTFKDAKAALIQSARDLYGSQDAASVEAAWNAVGL

SEQ ID NO: 70978 - protein, 300 aa, Bacillus amyloliquefaciens
AATTGTGTTLKGKTVSLNISSESGKYVLRDLSKPTGTQIITYDLQNREYNLPGTLVSSTTNQFTISSQRAAVDAHYNLGKVYDYFYQKFNRNSYDNKGGKIVSSVHYGSRYNNAAWIGDQMIYGDGDGSFFSPLSGSMDVTAHEMTHGVTQETANLNYENQPGALNESFSDVFGYFNDTEDWDIGEDITVSQPALRSLSNPTKYGQPDNFKNYKNLPNTDAGDYGGVHTNSGIPNKAAYNTITKIGVNKAEQIYYRALTVYLTPSSTFKDAKAALIQSARDLYGSQDAASVEAAWNAVGL

SEQ ID NO: 70979 - protein, 300 aa, Bacillus amyloliquefaciens
AATTGTGTTLKGKTVSLNISSESGKYVLRDLSKPTGTQIITYDLQNREYNLPGTLVSSTTNQFTTSSQRAAVDAHYNLGKVYDYFYQKFNRNSYDNKGGKIVSSVHYGSRYNNAAWIGDQMIYGDGDGSFFSPLSGSMDVTAHEMTHGVTQETANLNYENQPGALNESFSDVFGYFNDNEDWDIGEDITVSQPALRSLSNPTKYGQPDNFKNYKNLPNTDAGDYGGVHTNSGIPNKAAYNTITKIGVNKAEQIYYRALTVYLTPSSTFKDAKAALIQSARDLYGSQDAASVEAAWNAVGL

SEQ ID NO: 70980 - protein, 300 aa, Bacillus amyloliquefaciens
AATTGTGTTLKGKTVSLNISSESGKYVLRDLSKPTGTQIITYDLQNREYNLPGTLVSSTTNQFTTSSQRAAVDAHYNLGKVYDYFYQKFNRNSYDNKGGKIVSSVHYGSRYNNAAWIGDQMIYGDGDGSFFSPLSGSMDVTAHEMTHGVTQETANLNYENQPGALNESFSDVFGYFNDTEDWDIGEDITVNQPALRSLSNPTKYGQPDNFKNYKNLPNTDAGDYGGVHTNSGIPNKAAYNTITKIGVNKAEQIYYRALTVYLTPSSTFKDAKAALIQSARDLYGSQDAASVEAAWNAVGL

SEQ ID NO: 70981 - protein, 300 aa, Bacillus amyloliquefaciens
AATTGTGTTLKMKTVSLNISSESGKYVLRDLSKPTGTQIITYDLQNREYNLPGTLVSSTTNQFTTSSQRAAVDAHYNLGKVYDYFYQKFNRNSYDNKGGKIVSSVHYGSRYNNAAWIGDQMIYGDGDGSFFSPLSGSMDVTAHEMTHGVTQETANLNYENQPGALNESFSDVFGYFNDTEDWDIGEDITVSQPALRSLSNPTKYGQPDNFKNYKNLPNTDAGDYGGVHTNSGIPNKAAYNTITKIGVNKAEQIYYRALTVYLTPSSTFKDAKAALIQSARDLYGSQDAASVEAAWNAVGL

SEQ ID NO: 70982 - protein, 300 aa, Bacillus amyloliquefaciens
AATTGTGTTLKGKTVSLNISSESPKYVLRDLSKPTGTQIITYDLQNREYNLPGTLVSSTTNQFTTSSQRAAVDAHYNLGKVYDYFYQKFNRNSYDNKGGKIVSSVHYGSRYNNAAWIGDQMIYGDGDGSFFSPLSGSMDVTAHEMTHGVTQETANLNYENQPGALNESFSDVFGYFNDTEDWDIGEDITVSQPALRSLSNPTKYGQPDNFKNYKNLPNTDAGDYGGVHTNSGIPNKAAYNTITKIGVNKAEQIYYRALTVYLTPSSTFKDAKAALIQSARDLYGSQDAASVEAAWNAVGL

SEQ ID NO: 70983 - protein, 300 aa, Bacillus amyloliquefaciens
AATTGTGTTLKGKTVSLNISSESGKYVLRDLSKPTGTQIITYDLQNREYNLPGTLVSSTTNQFTTSSQRAAVDAHYNLGKVYDYFYQKFNRNSYDNKGGKIVSSVHYGSRYNNAAWIGDQMIYGDGDGSFFSPLSGSMDVTAHEMTHGVTQETANLNYENQPGALNESFSDVFGYFNDHEDWDIGEDITVSQPALRSLSNPTKYGQPDNFKNYKNLPNTDAGDYGGVHTNSGIPNKAAYNTITKIGVNKAEQIYYRALTVYLTPSSTFKDAKAALIQSARDLYGSQDAASVEAAWNAVGL

SEQ ID NO: 70984 - protein, 300 aa, Bacillus amyloliquefaciens
AATTGTGTTLKGKTVSLNISSESGKYVLRDLSKPTGTQIITYDLQNREYNLPGTLVSSTTNQFTTSSQRAAVDAHYNLGKVYDYFYQKFNRNSYDNKGGKIVSSVHYGSRYNNAAWIGDQMIYGDGDKSFFSPLSGSMDVTAHEMTHGVTQETANLNYENQPGALNESFSDVFGYFNDTEDWDIGEDITVSQPALRSLSNPTKYGQPDNFKNYKNLPNTDAGDYGGVHTNSGIPNKAAYNTITKIGVNKAEQIYYRALTVYLTPSSTFKDAKAALIQSARDLYGSQDAASVEAAWNAVGL

SEQ ID NO: 70985 - protein, 300 aa, Bacillus amyloliquefaciens
AATTGTGTTLKGKTVSLNISSESGKYVLRDLSKPTGTQIITYDLQNREYNLPGTLVSSTTNQFTTSSQRAAVDAHYNLGKVYDYFYQKFNRNSYDNKGGKIVSSVHYGSRYNNAAWIGDQMIYGDGDGSLFSPLSGSLDVTAHEMTHGVTQFTANLNYENQPGALNESFSDVFGYFNDPEDWDIGEDITVSQPALRSLSNPTKYGQPDNFKNYKNLPNTDAGDYGGVHTNSGIPNKAAYNTITKIGVNKAEQIYYRALTVYLTPSSTFKDAKAALIQSARDLYGSQDAASIEAAWNAVGL

SEQ ID NO: 70986 - protein, 300 aa, Bacillus amyloliquefaciens
AATTGTGTTLKGKTVSLNISSKSGKYVLRDLSKPTGTQIITYDLQNREYNLPGTLVSSTTNQFTTSSQRAAVDAHYNLGKVYDYFYQKFNRNSYDNKGGKIVSSVHYGSRYNNAAWIGDQMIYGDGDGSFFSPLSGSMDVTAHEMTHGVTQETANLNYENQPGALNESFSDVFGYFNDTEDWDIGEDITVSQPALRSLSNPTKYGQPDNFKNYKNLPNTDAGDYGGVHTNSGIPNKAAYNTITKIGVNKAEQIYYRALTVYLTPSSTFKDAKAALIQSARDLYGSQDAASVEAAWNAVGL

SEQ ID NO: 70987 - protein, 300 aa, Bacillus amyloliquefaciens
AATTGTGTTLKGKTVSLNISSESGKYVLRDLSKPTGTQIITYDLQNREYNLPGTLVSSTTNQFTTSSQRAAVDAHYNLGKVYDYFYQKFNRNSYDNKGGKIVSSVHYGSRYNNAAWIGTQMIYGDGDGSFFSPLSGSMDVTAHEMTHGVTQETANLNYENQPGALNESFSDVFGYFNDTEDWDIGEDITVSQPALRSLSNPTKYGQPDNFKNYKNLPNTDAGDYGGVHTNSGIPNKAAYNTITKIGVNKAEQIYYRALTVYLTPSSTFKDAKAALIQSARDLYGSQDAASVEAAWNAVGL

SEQ ID NO: 70988 - protein, 300 aa, Bacillus amyloliquefaciens
AATTGTGTTLKGKTVSLNISSESGKYVLRDLSKPTGTQIITYDLQNREYNLPGTLVSSTTNQFTTSSQRAAVDAHYNLGKVYDYFYQKFNRNSYDNKGGKIVSSVHYGSRYNNAAWIGDQMIYGDGDGSFFSPLSGSMDVTAHEMTHGVTQETANLNYENQPGALNESFSDVFGYFNDTEDWDIGEDITVSQPALRSLSNPTKYGQPDNFKNYKNLPNTDFGDYGGVHTNSGIPNKAAYNTITKIGVNKAEQIYYRALTVYLTPSSTFKDAKAALIQSARDLYGSQDAASVEAAWNAVGL

SEQ ID NO: 70989 - protein, 300 aa, Bacillus amyloliquefaciens
AATTGTGTTLKGKTVSLNISSESGKYVLRDLSKPTGTQIITYDLQNREYNLPGTLVSSTTNQFTTSSQRAAVDAHYNLGKVYDYFYQKFNRNSYDNKGGKIVSSVHYGSRYNNAAWIGDQMIYGDGDGSFFSPLSGSMDVTAHEMTHGVTQETANLNYENQPGALNESFSDVFGYFNDTEDWDIGEDITISQPALRSLSNPTKYGQPDNFKNYKNLPNTVAGDYGGVHTNSGIPNKAAYNTITKIGVNKAEQIYYRALTVYLTPWSTFKDAKAALIQSARDFYGSQDAASVEAAWNAVGL

SEQ ID NO: 70990 - protein, 300 aa, Bacillus amyloliquefaciens
AATTGTGTTLKGKTVSLNISSESGKYVLRDLSKPTGTQIITYDLQNREYNLPGTLVSSTTNQFTTSSQRAAVDAHYNLGKVYDYFYQKFNRNSYDNKGGKIVSSVHYGSRYNNAAWIGDQMIYGDGDGSFFSPLSGSMDVTAHEMTHGVTQETANLNYENQPGALNESFSDVFGYFNDVEDWDIGEDITVSQPALRSLSNPTKYGQPDNFKNYKNLPNTDAGDYGGVHTNSGIPNKAAYNTITKIGVNKAEQIYYRALTVYLTPSSTFKDAKAALIQSARDLYGSQDAASVEAAWNAVGL

SEQ ID NO: 70991 - protein, 300 aa, Bacillus amyloliquefaciens
AATTGTGTTLKGKQVSLNISSESGKYVLRDLSKPTGTQIITYDLQNREYNLPGTLVSSTTNQFTTSSQRAAVDAHYNLGKVYDYFYQKFNRNSYDNKGGKIVSSVHYGSRYNNAAWIGDQMIYGDGDGSFFSPLSGSMDVTAHEMTHGVTQETANLNYENQPGALNESFSDVFGYFNDTEDWDIGEDITVSQPALRSLSNPTKYGQPDNFKNYKNLPNTDAGDYGGVHTNSGIPNKAAYNTITKIGVNKAEQIYYRALTVYLTPSSTFKDAKAALIQSARDLYGSQDAASVEAAWNAVGL

SEQ ID NO: 70992 - protein, 300 aa, Bacillus amyloliquefaciens
AATTGTGTTLKGKTVSLNISSESGKYVLRDLSKPTGTQIITYDLQNREYNLPGTLVSSTTNQFTTSSQRAAVDAHYNLGKVYDYFYQKFNRNSYDNKGGKIVSSVHYGSRYNNAAWIGDQMIYGDGDGSFFSPLSGSMDVTAHEMTHGVTQETANLNYENQPGALNESFSDVFGYFNDYEDWDIGEDITVSQPALRSLSNPTKYGQPDNFKNYKNLPNTDAGDYGGVHTNSGIPNKAAYNTITKIGVNKAEQIYYRALTVYLTPSSTFKDAKAALIQSARDLYGSQDAASVEAAWNAVGL

SEQ ID NO: 70993 - protein, 300 aa, Bacillus amyloliquefaciens
AATTGTGTTLKGKTVSLNISSESGKYVLRDLSKPTGTQIITYDLQNREYNLPGTLVSSTTNQFTTSSQRAAVDAHYNLGKVYDYFYQKFNRNSYDHKGGKIVSSVHYGSRYNNAAWIGDQMIYGDGDGSFFSPLSGSMDVTAHEMTHGVTQETANLNYENQPGALNESFSDVFGYFNDTEDWDIGEDITVSQPALRSLSNPTKYGQPDNFKNYKNLPNTDAGDYGGVHTNSGIPNKAAYNTITKIGVNKAEQIYYRALTVYLTPSSTFKDAKAALIQSARDLYGSQDAASVEAAWNAVGL

SEQ ID NO: 70994 - protein, 300 aa, Bacillus amyloliquefaciens
AATTGTGTTLKGKTVSLNISSESGKYVLRDLSKPTGTQIITYDLQNREYNLPGTLVSSTTNQFTTSSQRAAVDAHYNLGKVYDYFYQKFNRNSYDNKGGKIVSSVHYGSRYNNAAWIGDQMIYGDGDGSFFSPLSGSMDVTAHEMTHGVTQETANLNYENQPGALNESFSDVFGYFNDTEDWDIGEDITVSQPALRSLVNPTKYGQPDNFKNYKNLPNTDAGDYGGVHTNSGIPNKAAYNTITKIGVNKAEQIYYRALTVYLTPSSTFKDAKAALIQSARDLYGSQDAASVEAAWNAVGL

SEQ ID NO: 70995 - protein, 300 aa, Bacillus amyloliquefaciens
AATTGTGTTLKGKTVSLNISSEYGKYVLRDLSKPTGTQIITYDLQNREYNLPGTLVSSTTNQFTTSSQRAAVDAHYNLGKVYDYFYQKFNRNSYDNKGGKIVSSVHYGSRYNNAAWIGDQMIYGDGDGSFFSPLSGSMDVTAHEMTHGVTQETANLNYENQPGALNESFSDVFGYFNDTEDWDIGEDITVSQPALRSLSNPTKYGQPDNFKNYKNLPNTDAGDYGGVHTNSGIPNKAAYNTITKIGVNKAEQIYYRALTVYLTPSSTFKDAKAALIQSARDLYGSQDAASVEAAWNAVGL

SEQ ID NO: 70996 - protein, 300 aa, Bacillus amyloliquefaciens
AATTGTGTTLKGKTVSLNISSESGKYVLRDLSKPTGTQIITYDLQNREYNLPGTLVSSTTNQFTTSSQRAAVDAHYNLGKVYDYFYVKFNRNSYDNKGGKIVSSVHYGSRYNNAAWIGDQMIYGDGDGSFFSPLSGSMDVTAHEMTHGVTQETANLNYENQPGALNESFSDVFGYFNDTEDWDIGEDITVSQPALRSLSNPTKYGQPDNFKNYKNLPNTDAGDYGGVHTNSGIPNKAAYNTITKIGVNKAEQIYYRALTVYLTPSSTFKDAKAALIQSARDLYGSQDAASVEAAWNAVGL

SEQ ID NO: 70997 - protein, 300 aa, Bacillus amyloliquefaciens
AATTGTGTTLKGKTVSLNISSESGKYVLRDLSKPTGTQIITYDLQNREYNLPGTLVSSTTNQFTTSSQRAAVDAHYNLGKVYDYFYQKFNRNSYDNKGGKIVSSVHYGSRYNNAAWIGDQMIYGDGDGSFFSPLSGSMDVTAHEMTHGVTQETANLNYENQPGALNESFSDVFGYFNDTEDWDIGEDITVSQPALRSLSNPTKYGQPDNFKNYKNLPNTDAGDYGGVHINSGIPNKAAYNTITKIGVNKAEQIYYRALTVYLTPSSTFKDAKAALIQSARDLYGSQDAASVEAAWNAVGL

SEQ ID NO: 70998 - protein, 300 aa, Bacillus amyloliquefaciens
AATTGTGTTLKGKTVSLNISSESGKYVLRDLSKPTGTQIITYDLQNREYNLPGTLVSSTLNQFTTSSQRAAVDAHYNLGKVYDYFYQKFNRNSYDNKGGKIVSSVHYGSRYNNAAWIGDQMIYGDGDGSFFSPLSGSMDVTAHEMTHGVTQETANLNYENQPGALNESFSDVFGYFNDTEDWDIGEDITVSQPALRSLSNPTKYGQPDNFKNYKNLPNTDAGDYGGVHTNSGIPNKAAYNTITKIGVNKAEQIYYRALTVYLTPSSTFKDAKAALIQSARDLYGSQDAASVEAAWNAVGL

SEQ ID NO: 70999 - protein, 300 aa, Bacillus amyloliquefaciens
AATTGTGTTLKGKTVSLNISSESGKYVLRDLSKPTGTQIITYDLQNREYNLPGTLVSSTTNQFTTSSQRAAVDAHYNLGKVYDYFYQKFNRNSYDNKGGKIVSSVHYGSRYNNAAWIGDQMIYGDGDGSFFSPLSGSMDVTAHEMTHGVTQETANLNYENQPGALNESFSDVFGYFNDTEDWDIGEDITVRQPALRSLSNPTKYGQPDNFKNYKNLPNTDAGDYGGVHTNSGIPNKAAYNTITKIGVNKAEQIYYRALTVYLTPSSTFKDAKAALIQSARDLYGSQDAASVEAAWNAVGL

SEQ ID NO: 71000 - protein, 300 aa, Bacillus amyloliquefaciens
AATTGTGTTLKGKTVSLNISSESGKYVLRDLSKPTGTQIITYDLQNREYNLPGTLVSSTTNQFTTSSQRAAVDAHYNLGKVYDYFYQKFNRNSYDNKGGKIVSSVHYGSRYNNAAWIGDQMIYGDGDGMFFSPLSGSMDVTAHEMTHGVTQETANLNYENQPGALNESFSDVFGYFNDTEDWDIGEDITVSQPALRSLSNPTKYGQPDNFKNYKNLPNTDAGDRGGVHTNSGIPNKAAYNTITKIGVNKAEQIYYRALTVYLTPSSTFKDAKAALIQSARDLYGSQDAASVEAAWNAVGL

SEQ ID NO: 71001 - protein, 300 aa, Bacillus amyloliquefaciens
AATTGTGTTLKGKTVSLNISSESGKYVLRDLSKPTGTQIITYDLQNREYNLPGTLVSSTTNQFTTSSQRAAVDAHYNLGKVYDYFYQKFNRNSYDNKGGKIVSSVHYGSRYNNAAWIGDQMIYGDGDGSFFSPLSGSMDVTAHEMTHGVTQETANLNYENQPGALNESFSDVFGYFNDTEDWDIGEDITVSQPALRSLSNPTKYGQPDNFKNYKNLPNTDAGDYGGVHTNSGIPNKAAYNTITKIGVNKAEQIYYRALTVYLTPSSTFKDAKAALIQSALDLYGSQDAASVEAAWNAVGL

SEQ ID NO: 71002 - protein, 300 aa, Bacillus amyloliquefaciens
AATTGTGTTLKGKTVSLNISSESGKYVLRDLSKPTGTQIITYDLQNREYNLPGTLVSSTTNQFTTSSQRAAVDAHYNLGKVYDYFYQKFNRNSYDNKGGKIVSSVHYGSRYNNAAWIGDQMIYGDGDGSFFSPLSGSMDVTAHEMTHGVTQETANLNYENQPGALNESFSDVFGYFNDTEDWDIGEDITVKQPALRSLSNPTKYGQPDNFKNYKNLPNTDAGDYGGVHTNSGIPNKAAYNTITKIGVNKAEQIYYRALTVYLTPSSTFKDAKAALIQSARDLYGSQDAASVEAAWNAVGL

SEQ ID NO: 71003 - protein, 300 aa, Bacillus amyloliquefaciens
AATTGTGTTLKGKTVSLNISSESGKYVLRDLSKPTGTQIITYDLKNREYNLPGTLVSSTTNQFTTSSQRAAVDAHYNLGKVYDYFYQKFNRNSYDNKGGKIVSSVHYGSRYNNAAWIGDQMIYGDGDGSFFSPLSGSMDVTAHEMTHGVTQETANLNYENQPGALNESFSDVFGYFNDTEDWDIGEDITVSQPALRSLSNPTKYGQPDNFKNYKNLPNTDAGDYGGVHTNSGIPNKAAYNTITKIGVNKAEQIYYRALTVYLTPSSTFKDAKAALIQSARDLYGSQDAASVEAAWNAVGL

SEQ ID NO: 71004 - protein, 300 aa, Bacillus amyloliquefaciens
AATTGTGTTLKGKTVSLNISSESGKYVLRDLSKPTGTQIITYDLQNREYFLPGTLVSSTTNQFTTSSQRAAVDAHYNLGKVYDYFYQKFNRNSYDNKGGKIVSSVHYGSRYNNAAWIGDQMIYGDGDGSFFSPLSGSMDVTAHEMTHGVTQETANLNYENQPGALNESFSDVFGYFNDTEDWDIGEDITVSQPALRSLSNPTKYGQPDNFKNYKNLPNTDAGDYGGVHTNSGIPNKAAYNTITKIGVNKAEQIYYRALTVYLTPSSTFKDAKAALIQSARDLYGSQDAASVEAAWNAVGL

SEQ ID NO: 71005 - protein, 300 aa, Bacillus amyloliquefaciens
AATTGTGTTLKWKTVSLNISSESGKYVLRDLSKPTGTQIITYDLQNREYNLPGTLVSSTTNQFTTSSQRAAVDAHYNLGKVYDYFYQKFNRNSYDNKGGKIVSSVHYGSRYNNAAWIGDQMIYGDGDGSFFSPLSGSMDVTAHEMTHGVTQETANLNYENQPGALNESFSDVFGYFNDTEDWDIGEDITVSQPALRSLSNPTKYGQPDNFKNYKNLPNTDAGDYGGVHTNSGIPNKAAYNTITKIGVNKAEQIYYRALTVYLTPSSTFKDAKAALIQSARDLYGSQDAASVEAAWNAVGL

SEQ ID NO: 71006 - protein, 300 aa, Bacillus amyloliquefaciens
AATTGTGTTLKGKTVSLNISSESGKYVLRDLSKPTGTQIITYDLQNREYNLPGTLVSSTTNQFTTSSQRAAVDAHYNLGKVYDYFYQKFNRNSYDNKGGKIVSSVHYGSRYNNAAWIGDQMIYGDGDGSFFSPLSGSMDVTAHEMTHGVTQETANLNYENQPGALNESFSDVFGYFNDIEDWDIGEDITVSQPALRSLSNPTKYGQPDNFKNYKNLPNTDAGDYGGVHTNSGIPNKAAYNTITKIGVNKAEQIYYRALTVYLTPSSTFKDAKAALIQSARDLYGSQDAASVEAAWNAVGL

SEQ ID NO: 71007 - protein, 300 aa, Bacillus amyloliquefaciens
AATTGTGTTLKGKTVSLNISSESGKYVLRDLSKPTGTQIITYDLQNREYNLPGTLVSSTTNQFTTSSQRAAVDAHYNLGKVYDYFYQKFNRNSYDNKGGKIVSSVHYGSRYNNAAWIGDQMIYGDGDGSFFSPLSGSMDVTAHEMTHGVTQETANLNYENQPGALNESFSDVFGYFNDTEDWDIGEDITVSQPALRSLSNPTKYHQPDNFKNYKNLPNTDAGDYGGVHTNSGIPNKAAYNTITKIGVNKAEQIYYRALTVYLTPSSTFKDAKAALIQSARDLYGSQDAASVEAAWNAVGL

SEQ ID NO: 71008 - protein, 300 aa, Bacillus amyloliquefaciens
AATTGTGTTLKGKTVSLNISSESGKYVLRDLSKPTGTQIITYDLQNREYNLPGTLVSSTTNQFTTSSQRAAVDAHYNLGKVYDYFYQKFNRNSYDNKGGKIVSSVHYGSRYNNAAWIGDQMIYGDGDGSFFSPLSGSMDVTAHEMTHGVTQETARLNYENQPGALNESFSDVFGYFNDTEDWDIGEDITVSQPALRSLSNPTKYGQPDNFKNYKNLPNTDAGDYGGVHTNSGIPNKAAYNTITKIGVNKAEQIYYRALTVYLTPSSTFKDAKAALIQSARDLYGSQDAASVEAAWNAVGL

SEQ ID NO: 71009 - protein, 300 aa, Bacillus amyloliquefaciens
AATTGTGTTLKGKTVSLNISSESGKYVLRDLSKPTGTQIITYDLQNREYNLPGTLVSSTTNQFTTSSQRAAVDAHYNLGKVYDYFYQKFNRNSYDNKGGKIVSSVHYGSRYNNAAWIGDQMIYGDGDGSFFSPLSGSMDVTAHEMTHGVTQETANLNYENQPGALNESFSDVFGYFNDTEDWDIGEDITVSQPALRSLQNPTKYGQPDNFKNYKNLPNTDAGDYGGVHTNSGIPNKAAYNTITKIGVNKAEQIYYRALTVYLTPSSTFKDAKAALIQSARDLYGSQDAASVEAAWNAVGL

SEQ ID NO: 71010 - protein, 300 aa, Bacillus amyloliquefaciens
AATTGTGTTLKGKTVSLNISSESGKYVLRDLSKPTGTQIITYDLQNREYNLPGTLVSSTTNQFTHSSQRAAVDAHYNLGKVYDYFYQKFNRNSYDNKGGKIVSSVHYGSRYNNAAWIGDQMIYGDGDGSFFSPLSGSMDVTAHEMTHGVTQETANLNYENQPGALNESFSDVFGYFNDTEDWDIGEDITVSQPALRSLSNPTKYGQPDNFKNYKNLPNTDAGDYGGVHTNSGIPNKAAYNTITKIGVNKAEQIYYRALTVYLTPSSTFKDAKAALIQSARDLYGSQDAASVEAAWNAVGL

SEQ ID NO: 71011 - protein, 300 aa, Bacillus amyloliquefaciens
AATTGTGTTLKGKTVSLNISSESGKYVLRDLSKPTGTQIITYDLQNREYNLPGTLVSSTTNQFTTSSQRAAVDAHYNLGKVYDYFYQKFNRNSYDNKGGKIVSSVHYGSRYNNAAWIGDQMIYGDGDRSFFSPLSGSMDVTAHEMTHGVTQETANLNYENQPGALNESFSDVFGYFNDTEDWDIGEDITVSQPALRSLSNPTKYGQPDNFKNYKNLPNTDAGDYGGVHTNSGIPNKAAYNTITKIGVNKAEQIYYRALTVYLTPSSTFKDAKAALIQSARDLYGSQDAASVEAAWNAVGL

SEQ ID NO: 71012 - protein, 300 aa, Bacillus amyloliquefaciens
AATTGTGTTLKGKTVSLNISSESGKYVLRDLSKPTGTQIITYDLQNREYNLPGTLVSSTTNQFTLSSQRAAVDAHYNLGKVYDYFYQKFNRNSYDNKGGKIVSSVHYGSRYNNAAWIGDQMIYGDGDGSFFSPLSGSMDVTAHEMTHGVTQETANLNYENQPGALNESFSDVFGYFNDTEDWDIGEDITVSQPALRSLSNPTKYGQPDNFKNYKNLPNTDAGDYGGVHTNSGIPNKAAYNTITKIGVNKAEQIYYRALTVYLTPSSTFKDAKAALIQSARDLYGSQDAASVEAAWNAVGL

SEQ ID NO: 71013 - protein, 300 aa, Bacillus amyloliquefaciens
AATTGTGTTLKGKTVSLNISSESGKYVLRDLSKPTGTQIITYDLQNREYNLPGTLVSSTTNQFTTSSQRAAVDAHYNLGKVYDYFYIKFNRNSYDNKGGKIVSSVHYGSRYNNAAWIGDQMIYGDGDGSFFSPLSGSMDVTAHEMTHGVTQETANLNYENQPGALNESFSDVFGYFNDTEDWDIGEDITVSQPALRSLSNPTKYGQPDNFKNYKNLPNTDAGDYGGVHTNSGIPNKAAYNTITKIGVNKAEQIYYRALTVYLTPSSTFKDAKAALIQSARDLYGSQDAASVEAAWNAVGL

SEQ ID NO: 71014 - protein, 300 aa, Bacillus amyloliquefaciens
AATTGTGTTLKGKTVSLNISSESGKYVLRDLSKPTGTQIITYDLQNREYNLPGTLVSSTTNQFTTSSQRAAVDAHYNLGKVYDYFYQKFNRNSYDNKGGKIVSSVHYGSRYNNAAWIGDQMIYGDGDGSFFSPLSGSMDVTAHEMTHGVTQETANLNYENQPGALNESFSDVFGYFNDTEDWDIGEDITVSQPALRSLSNPTKYGQPDNFKNYKNLPNTDANDYGGVHTNSGIPNKAAYNTITKIGVNKAEQIYYRALTVYLTPSSTFKDAKAALIQSARDLYGSQDAASVEAAWNAVGL

SEQ ID NO: 71015 - protein, 300 aa, Bacillus amyloliquefaciens
AATTGTGTTLKGKTVSLNISSESGKYVLRDLSKPTGTQIITYDLQNREYNLPGTLVSSTTNQFTTSSQRAAVDAHYNLGKVYDYFYWKFNRNSYDNKGGKIVSSVHYGSRYNNAAWIGDQMIYGDGDGSFFSPLSGSMDVTAHEMTHGVTQETANLNYENQPGALNESFSDVFGYFNDTEDWDIGEDITVSQPALRSLSNPTKYGQPDNFKNYKNLPNTDAGDYGGVHTNSGIPNKAAYNTITKIGVNKAEQIYYRALTVYLTPSSTFKDAKAALIQSARDLYGSQDAASVEAAWNAVGL

SEQ ID NO: 71016 - protein, 300 aa, Bacillus amyloliquefaciens
AATTGTGTTLKGKTVSLNISSESGKYVLRDLSKPTGTQIITYDLQNREYNLPGTLVSSTTNQFTTSSQRAAVDAHYNLGKVYDYFYQKFNRNSYDNQGGKIVSSVHYGSRYNNAAWIGDQMIYGDGDGSFFSPLSGSMDVTAHEMTHGVTQETANLNYENQPGALNESFSDVFGYFNDTEDWDIGEDITVSQPALRSLSNPTKYGQPDNFKNYKNLPNTDAGDYGGVHTNSGIPNKAAYNTITKIGVNKAEQIYYRALTVYLTPSSTFKDAKAALIQSARDLYGSQDAASVEAAWNAVGL

SEQ ID NO: 71017 - protein, 300 aa, Bacillus amyloliquefaciens
AATTGTGTTLKGKTVSLNISSESGKYVLRDLSKPTGTQIITYDLQNREYNLPGTLVSSTTNQFTTSSQRAAVDAHYNLGKVYDYFYQKFNRNSYDNKGGKIVSSVHYGSRYNNAAWIGDQMIYGDGDGSIFSPLSGSLDVTAHEMTHGVTQHTANLNYENQPGALNESFSDVFGYFNDPEDWDIGEDITVSQPALRSLSNPTKYGQPDNFKNYKNLPNTDAGDYGGVHTNSGIPNKAAYNTITKIGVNKAEQIYYRALTVYLTPSSTFKDAKAALIQSARDLYGSQDAASVEAAWNAVGL

SEQ ID NO: 71018 - protein, 300 aa, Bacillus amyloliquefaciens
AATTGTGTTLKGKTVSLNISSESGKYVLRDLSKPTGTQIITYDLQNREYNLPGTLVSSMTNQFTTSSQRAAVDAHYNLGKVYDYFYQKFNRNSYDNKGGKIVSSVHYGSRYNNAAWIGDQMIYGDGDGSFFSPLSGSMDVTAHEMTHGVTQETANLNYENQPGALNESFSDVFGYFNDTEDWDIGEDITVSQPALRSLSNPTKYGQPDNFKNYKNLPNTDAGDYGGVHTNSGIPNKAAYNTITKIGVNKAEQIYYRALTVYLTPSSTFKDAKAALIQSARDLYGSQDAASVEAAWNAVGL

SEQ ID NO: 71019 - protein, 300 aa, Bacillus amyloliquefaciens
AATTGTGTTLKGKTVSLNISSESGKYVLRDLSKPTGTQIITYDLQNREYNLPGTLVSSTTNQFTTFSQRAAVDAHYNLGKVYDYFYQKFNRNSYDNKGGKIVSSVHYGSRYNNAAWIGDQMIYGDGDGSFFSPLSGSMDVTAHEMTHGVTQETANLNYENQPGALNESFSDVFGYFNDTEDWDIGEDITVSQPALRSLSNPTKYGQPDNFKNYKNLPNTDAGDYGGVHTNSGIPNKAAYNTITKIGVNKAEQIYYRALTVYLTPSSTFKDAKAALIQSARDLYGSQDAASVEAAWNAVGL

SEQ ID NO: 71020 - protein, 300 aa, Bacillus amyloliquefaciens
AATTGTGTTLKGKTVSLNISSESGKYVLRDLSKPTGTQIITYDLQNREYNLPGTLVSSTTNQFTTSSQRAAVDAHYNLGKVYDYFYQKFNRNSYDNKGGKIVSSVHYGSRYNNAAWIGDQMIYGDGDGSFFSPLSGSMDVTAHEMTHGVTQETANLNYENQPGALNESFSDVFGYFNDTEDWDIGEDITVSQPALRSLSNPTKYGQPDNFKNYKNLPPTDAGDYGGVHTNSGIPNKAAYNTITKIGVNKAEQIYYRALTVYLTPSSTFKDAKAALIQSARDLYGSQDAASVEAAWNAVGL

SEQ ID NO: 71021 - protein, 300 aa, Bacillus amyloliquefaciens
AATTGTGTTLKGKTVSLNISSESGKYVLRDLSKPTGTQIITYDLQNREYNLPGTLVSSRTNQFTTSSQRAAVDAHYNLGKVYDYFYQKFNRNSYDNKGGKIVSSVHYGSRYNNAAWIGDQMIYGDGDGSFFSPLSGSMDVTAHEMTHGVTQETANLNYENQPGALNESFSDVFGYFNDTEDWDIGEDITVSQPALRSLSNPTKYGQPDNFKNYKNLPNTDAGDYGGVHTNSGIPNKAAYNTITKIGVNKAEQIYYRALTVYLTPSSTFKDAKAALIQSARDLYGSQDAASVEAAWNAVGL

SEQ ID NO: 71022 - protein, 300 aa, Bacillus amyloliquefaciens
AATTGTGTTLKGKTVSLNISSESGKYVLRDLSKPTGTQIITYDLQNREYNLPGTLVSSTTNQFTTSSQRAAVDAHYNLGKVYDYFYQKFNRNSYDNKGGKIVSSVHYGSRYNNAAWIGDQMIYGDGDYSFFSPLSGSMDVTAHEMTHGVTQETANLNYENQPGALNESFSDVFGYFNDTEDWDIGEDITVSQPALRSLSNPTKYGQPDNFKNYKNLPNTDAGDYGGVHTNSGIPNKAAYNTITKIGVNKAEQIYYRALTVYLTPSSTFKDAKAALIQSARDLYGSQDAASVEAAWNAVGL

SEQ ID NO: 71023 - protein, 300 aa, Bacillus amyloliquefaciens
AATTGTGTTLKGKTVSLNISSEFGKYVLRDLSKPTGTQIITYDLQNREYNLPGTLVSSTTNQFTTSSQRAAVDAHYNLGKVYDYFYQKFNRNSYDNKGGKIVSSVHYGSRYNNAAWIGDQMIYGDGDGSFFSPLSGSMDVTAHEMTHGVTQETANLNYENQPGALNESFSDVFGYFNDTEDWDIGEDITVSQPALRSLSNPTKYGQPDNFKNYKNLPNTDAGDYGGVHTNSGIPNKAAYNTITKIGVNKAEQIYYRALTVYLTPSSTFKDAKAALIQSARDLYGSQDAASVEAAWNAVGL

SEQ ID NO: 71024 - protein, 300 aa, Bacillus amyloliquefaciens
AATTGTGTTLKGKTVSLNISSESGKYVLRDLSKPTGTQIITYDLQNREYNLPGTLVSSTTNQFTTSSQRAAVDAHYNLGKVYDYFYQKFNRNSYDNKGGKIVSSVHYGSRYNNAAWIGDQMIYGDGDMSFFSPLSGSMDVTAHEMTHGVTQETANLNYENQPGALNESFSDVFGYFNDTEDWDIGEDITVSQPALRSLSNPTKYGQPDNFKNYKNLPNTDAGDYGGVHTNSGIPNKAAYNTITKIGVNKAEQIYYRALTVYLTPSSTFKDAKAALIQSARDLYGSQDAASVEAAWNAVGL

SEQ ID NO: 71025 - protein, 300 aa, Bacillus amyloliquefaciens
AATTGTGTTLKGKTVSLNISSESGKYVLRDLSKPTGTQIITYDLQNREYNLPGTLVSSTTNQFTTSSQRAAVDAHYNLGKVYDYFYQKFNRNSYDNKGGKIVSSVHYGSRYNNAAWIGDQMIYGDGDGSFFSPLSGSMDVTAHEMTHGVTQETANLNYENQPGALNESFSDVFGYFNDFEDWDIGEDITVSQPALRSLSNPTKYGQPDNFKNYKNLPNTDAGDYGGVHTNSGIPNKAAYNTITKIGVNKAEQIYYRALTVYLTPSSTFKDAKAALIQSARDLYGSQDAASVEAAWNAVGL

SEQ ID NO: 71026 - protein, 300 aa, Bacillus amyloliquefaciens
AATTGTGTTLKGKTVSLNISSESGKYVLRDLSKPTGTQIITYDLQNREYNLPGTLVSSTTNQFTYSSQRAAVDAHYNLGKVYDYFYQKFNRNSYDNKGGKIVSSVHYGSRYNNAAWIGDQMIYGDGDGSFFSPLSGSMDVTAHEMTHGVTQETANLNYENQPGALNESFSDVFGYFNDTEDWDIGEDITVSQPALRSLSNPTKYGQPDNFKNYKNLPNTDAGDYGGVHTNSGIPNKAAYNTITKIGVNKAEQIYYRALTVYLTPSSTFKDAKAALIQSARDLYGSQDAASVEAAWNAVGL

SEQ ID NO: 71027 - protein, 300 aa, Bacillus amyloliquefaciens
AATTGTGTTLKGKTVSLNISSESGKYVLRDLSKPTGTQIITYDLQNREYNLPGTLVSSTTNQFTTSSQRAAVDAHYNLGKVYDYFYQKFNRNSYDRKGGKIVSSVHYGSRYNNAAWIGDQMIYGDGDGSFFSPLSGSMDVTAHEMTHGVTQETANLNYENQPGALNESFSDVFGYFNDTEDWDIGEDITVSQPALRSLSNPTKYGQPDNFKNYKNLPNTDAGDYGGVHTNSGIPNKAAYNTITKIGVNKAEQIYYRALTVYLTPSSTFKDAKAALIQSARDLYGSQDAASVEAAWNAVGL

SEQ ID NO: 71028 - protein, 300 aa, Bacillus amyloliquefaciens
AATTGTGTTLKGKTVSLNISSESGKYVLRDLSKPTGTQIITYDLQNREYNLPGVLVSSTTNQFTTSSQRAAVDAHYNLGKVYDYFYQKFNRNSYDNKGGKIVSSVHYGSRYNNAAWIGDQMIYGDGDGSFFSPLSGSMDVTAHEMTHGVTQETANLNYENQPGALNESFSDVFGYFNDTEDWDIGEDITVSQPALRSLSNPTKYGQPDNFKNYKNLPNTDAGDYGGVHTNSGIPNKAAYNTITKIGVNKAEQIYYRALTVYLTPSSTFKDAKAALIQSARDLYGSQDAASVEAAWNAVGL

SEQ ID NO: 71029 - protein, 300 aa, Bacillus amyloliquefaciens
AATTGTGTTLKGKTVSLNISSESGKYVLRDLSKPTGTQIITYDLQNREYNLPGTLVSSTTNQFTTSSQRAAVDAHYNLGKVYDYFYQKFNRNSYDNKGGKIVSSVHYGSRYNNAAWIGDQMIYGDGDGSFFSPLSGSMDVTAHEMTHGVTQETANLNYENQPGALNESFSDVFGYFNDTEDWDIGEDITVSQPALRSLSNPTKYGQPDNFKNYRNLPNTDAGDYGGVHTNSGIPNKAAYNTITKIGVNKAEQIYYRALTVYLTPSSTFKDAKAALIQSARDLYGSQDAASVEAAWNAVGL

SEQ ID NO: 71030 - protein, 300 aa, Bacillus amyloliquefaciens
AATTGTGTTLKGKTVSLNISSESGKYVLRDLSKPTGTQIITYDLQNREYNLPGTLVSSTTNQFTTSSQRAAVDAHYNLGKVYDYFYQKFNRNSYDNKGGKIVSSVHYGSRYNNAAWIGDQMIYGDGDGSFFSPLSGSMDVTAHEMTHGVTQETANLNYENQPGALNESFSDVFGYFNDTEDWDIGEDITVSQPALRSVSNPTKYGQPDNFKNYKNLPNTDAGDYGGVHTNSGIPNKAAYNTITKIGVNKAEQIYYRALTVYLTPSSTFKDAKAALIQSARDLYGSQDAASVEAAWNAVGL

SEQ ID NO: 71031 - protein, 300 aa, Bacillus amyloliquefaciens
AATTGTGTTLKGKTVSLNISSESGKYVLRDLSKPTGTQIITYDLQNREYNLPGTLVSSRTNQFTTSSQRAAVDAHYNLGKVYDYFYQKFNRNSYDNKGGKIVSSVHYGSRYNNAAWIGDQMIYGDGDGVFFSPLSGSMDVTAHEMTHGVTQETANLNYENQPGALNESFSDVFGYFNDTEDWDIGEDITVSQPALRSLSNPTKYGQPDNFKNYKNLPNTDAGDYGGVHTNSGIPNKAAYNTITKIGVNKAEQIYYRALTVYLTPSSTFKDAKAALIQSARDLYGSQDAASVEAAWNAVGL

SEQ ID NO: 71032 - protein, 300 aa, Bacillus amyloliquefaciens
AATTGTGTTLKGKTVSLNISSESGKYVLRDLSKPTGTQIITYDLQNREYNLPGTLVSSQTNQFTTSSQRAAVDAHYNLGKVYDYFYQKFNRNSYDNKGGKIVSSVHYGSRYNNAAWIGDQMIYGDGDGSFFSPLSGSMDVTAHEMTHGVTQETANLNYENQPGALNESFSDVFGYFNDTEDWDIGEDITVSQPALRSLSNPTKYGQPDNFKNYKNLPNTDAGDYGGVHTNSGIPNKAAYNTITKIGVNKAEQIYYRALTVYLTPSSTFKDAKAALIQSARDLYGSQDAASVEAAWNAVGL

SEQ ID NO: 71033 - protein, 300 aa, Bacillus amyloliquefaciens
AATTGTGTTLKGKTVSLNISSESGKYVLRDLSKPTGTQIITYDLQNREYNLPGTLVSSRTNQFTTQSQRAAVDAHYNLGKVYDYFYQKFNRNSYDNKGGKIVSSVHYGSRYNNAAWIGDQMIYGDGDGIFFSPLSGSMDVTAHEMTHGVTQETANLNYENQPGALNESFSDVFGYFNDTEDWDIGEDITVSQPALRSLSNPTKYGQPDNFKNYKNLPNTDAGDYGGVHTNSGIPNKAAYNTITKIGVNKAEQIYYRALTVYLTPSSTFKDAKAALIQSARDLYGSQDAASVEAAWNAVGL

SEQ ID NO: 71034 - protein, 300 aa, Bacillus amyloliquefaciens
AATEGTGTTLKGKTVSLNISSESGKYVLRDLSKPTGTQIITYDLQNREYNLPGTLVSSTTNQFTTSSQRAAVDAHYNLGKVYDYFYQKFNRNSYDNKGGKIVSSVHYGSRYNNAAWIGDQMIYGDGDGSFFSPLSGSMDVTAHEMTHGVTQETANLNYENQPGALNESFSDVFGYFNDTEDWDIGEDITVSQPALRSLSNPTKYGQPDNFKNYKNLPNTDAGDYGGVHTNSGIPNKAAYNTITKIGVNKAEQIYYRALTVYLTPSSTFKDAKAALIQSARDLYGSQDAASVEAAWNAVGL

SEQ ID NO: 71035 - protein, 300 aa, Bacillus amyloliquefaciens
AATTGTGTTLKGKTVSLNISSESGKYVLRDLSKPTGTQIITYDLQNREYNLPGTLVSSTTNQFTTRSQRAAVDAHYNLGKVYDYFYQKFNRNSYDNKGGKIVSSVHYGSRYNNAAWIGDQMIYGDGDGSFFSPLSGSMDVTAHEMTHGVTQETANLNYENQPGALNESFSDVFGYFNDTEDWDIGEDITVSQPALRSLSNPTKYGQPDNFKNYKNLPNTDAGDYGGVHTNSGIPNKAAYNTITKIGVNKAEQIYYRALTVYLTPSSTFKDAKAALIQSARDLYGSQDAASVEAAWNAVGL

SEQ ID NO: 71036 - protein, 300 aa, Bacillus amyloliquefaciens
AATTGTGTTLKGKTVSLNISSESGKYVLRDLSKPTGTQIITYDLQNREYNLPGTLVSSTTNQFTFSSQRAAVDAHYNLGKVYDYFYQKFNRNSYDNKGGKIVSSVHYGSRYNNAAWIGDQMIYGDGDGSFFSPLSGSMDVTAHEMTHGVTQETANLNYENQPGALNESFSDVFGYFNDTEDWDIGEDITVSQPALRSLSNPTKYGQPDNFKNYKNLPNTDAGDYGGVHTNSGIPNKAAYNTITKIGVNKAEQIYYRALTVYLTPSSTFKDAKAALIQSARDLYGSQDAASVEAAWNAVGL

SEQ ID NO: 71037 - protein, 300 aa, Bacillus amyloliquefaciens
AATTGTGTTLKGKTVSLNISSESGKYVLRDLSKPTGTQIITYDLQNREYNLPGTLVSSTTNQFTTSSQRAAVDAHYNLGKVYDYFYQKFNRNSYDNKGGKIVSSVHYGSRYNNAAWIGDQMIYGDGDGSIFSPLSGSMDVTAHEMTHGVTQETANLNYENQPGALNESFSDVFGYFNDPEDWDIGEDITVSQPALRSLSNPTKYGQPDNFKNYKNLPNTDAGDYGGVHTNSGIPNKAAYNTITKIGVNKAEQIYYRALTVYLTPSSTFKDAKAALIQSARDLYGSQDAASVEAAWNAVGL

SEQ ID NO: 71038 - protein, 300 aa, Bacillus amyloliquefaciens
AATTGTGTTLKGKTVSLNISSESGKYVLRDLSKPTGTQIITYDLQSREYNLPGTLVSSTTNQFTTSSQRAAVDAHYNLGKVYDYFYQKFNRNSYDNKGGKIVSSVHYGSRYNNAAWIGDQMIYGDGDGSFFSPLSGSMDVTAHEMTHGVTQETANLNYENQPGALNESFSDVFGYFNDTEDWDIGEDITVSQPALRSLSNPTKYGQPDNFKNYKNLPNTDAGDYGGVHTNSGIPNKAAYNTITKIGVNKAEQIYYRALTVYLTPSSTFKDAKAALIQSARDLYGSQDAASVEAAWNAVGL

SEQ ID NO: 71039 - protein, 300 aa, Bacillus amyloliquefaciens
AATTGTGTTLKGKTVSLNISSESGKYVLRDLSKPTGTQIITYDLQNREYNLPGTLVSSTTNQFTTSSQRAAVDAHYNLGKVYDYFYQKFNRNSYDNKGGKIVSSVHYGSRYNNAAWIGDQMIYGDGDGSFFSPLSGSMDVTAHEMTHGVTQETANLNYENQPGALNESFSDVFGYFNDTEDWDIGEDITVSQPALRSLSNPTKYFQPDNFKNYKNLPNTDAGDYGGVHTNSGIPNKAAYNTITKIGVNKAEQIYYRALTVYLTPSSTFKDAKAALIQSARDLYGSQDAASVEAAWNAVGL

SEQ ID NO: 71040 - protein, 300 aa, Bacillus amyloliquefaciens
AATTGTGTTLKGKTVSLNISSESGKYVLRDLSKPTGTQIITYDLQNREYNLPGTLVSSTTNQFTTSSQRAAVDAHYNLGKVYDYFYQKFNRNSYDNKGGKIVSSVHYGSRYNNAAWIGDQMIYGDGDGSFFSPLSGSLDVTAHEMTHGVTQFTANLNYENQPGALNESFSDVFGYFNDPEDWDIGEDITVSQPALRSLSNPTKYGQPDNFKNYKNLPNTDAGDYGGVHTNSGIPNKAAYNTITKIGVNKAEQIYYRALTVYLTPSSTFKDAKAALIQSARDLYGSQDAASVEAAWNAVGL

SEQ ID NO: 71041 - protein, 300 aa, Bacillus amyloliquefaciens
AATTGTGTTLKGKTVSLNISSESGKYVLRDLSKPTGTQIITYDLQNREYNLPGTLVSSTTNQFTTSSQRAAVDAHYNLGKVYDYFYQKFNRNSYDNKGGKIVSSVHYGSRYNNAAWIGDQMIYGDGDGSFFSPLSGSMDVTAHEMTHGVTQETANLNYENQPGALNESFSDVFGYFNDTEDWDIGEDITVSQPALRSLSNPTKYGQPDNFKNYKNLPNTEAGDYGGVHTNSGIPNKAAYNTITKIGVNKAEQIYYRALTVYLTPNSTFKDAKAALIQSARDLYGSQDAASVEAAWNAVGL

SEQ ID NO: 71042 - protein, 300 aa, Bacillus amyloliquefaciens
AATTGTGTTLKGKTVSLNISSESVKYVLRDLSKPTGTQIITYDLQNREYNLPGTLVSSTTNQFTTSSQRAAVDAHYNLGKVYDYFYQKFNRNSYDNKGGKIVSSVHYGSRYNNAAWIGDQMIYGDGDGSFFSPLSGSMDVTAHEMTHGVTQETANLNYENQPGALNESFSDVFGYFNDTEDWDIGEDITVSQPALRSLSNPTKYGQPDNFKNYKNLPNTDAGDYGGVHTNSGIPNKAAYNTITKIGVNKAEQIYYRALTVYLTPSSTFKDAKAALIQSARDLYGSQDAASVEAAWNAVGL

SEQ ID NO: 71043 - protein, 300 aa, Bacillus amyloliquefaciens
AATTGTGTTLKGKTVSLNISSESGKYVLRDLSKPTGTQIITYDLQNREYNLPGTLVSSTNNQFTTSSQRAAVDAHYNLGKVYDYFYQKFNRNSYDNKGGKIVSSVHYGSRYNNAAWIGDQMIYGDGDGSFFSPLSGSMDVTAHEMTHGVTQETANLNYENQPGALNESFSDVFGYFNDTEDWDIGEDITVSQPALRSLSNPTKYGQPDNFKNYKNLPNTDAGDYGGVHTNSGIPNKAAYNTITKIGVNKAEQIYYRALTVYLTPSSTFKDAKAALIQSARDLYGSQDAASVEAAWNAVGL

SEQ ID NO: 71044 - protein, 300 aa, Bacillus amyloliquefaciens
AATTGTGTTLKGKTVSLNISSESYKYVLRDLSKPTGTQIITYDLQNREYNLPGTLVSSTTNQFTTSSQRAAVDAHYNLGKVYDYFYQKFNRNSYDNKGGKIVSSVHYGSRYNNAAWIGDQMIYGDGDGSFFSPLSGSMDVTAHEMTHGVTQETANLNYENQPGALNESFSDVFGYFNDTEDWDIGEDITVSQPALRSLSNPTKYGQPDNFKNYKNLPNTDAGDYGGVHTNSGIPNKAAYNTITKIGVNKAEQIYYRALTVYLTPSSTFKDAKAALIQSARDLYGSQDAASVEAAWNAVGL

SEQ ID NO: 71045 - protein, 300 aa, Bacillus amyloliquefaciens
AATTGTGTTLKGKTVSLNISSESGKYVLRDLSKPTGTQIITYDLQNREYNLPGTLVSSTTNQFTTSSQRAAVDAHYNLGKVYDYFYQKFNRNSYDNKGGKIVSSVHYGSRYNNAAWIGDQMIYGDGDGSFFSPLSGSMDVTAHEMTHGVTQNTANLNYENQPGALNESFSDVFGYFNDTEDWDIGEDITVSQPALRSLSNPTKYGQPDNFKNYKNLPNTDAGDYGGVHTNSGIPNKAAYNTITKIGVNKAEQIYYRALTVYLTPSSTFKDAKAALIQSARDLYGSQDAASVEAAWNAVGL

SEQ ID NO: 71046 - protein, 300 aa, Bacillus amyloliquefaciens
AATTCTGTTLKGKTVSLNISSESGKYVLRDLSKPTGTQIITYDLQNREYNLPGTLVSSTTNQFTTSSQRAAVDAHYNLGKVYDYFYQKFNRNSYDNKGGKIVSSVHYGSRYNNAAWIGDQMIYGDGDGSFFSPLSGSMDVTAHEMTHGVTQETANLNYENQPGALNESFSDVFGYFNDTEDWDIGEDITVSQPALRSLSNPTKYGQPDNFKNYKNLPNTDAGDYGGVHTNSGIPNKAAYNTITKIGVNKAEQIYYRALTVYLTPSSTFKDAKAALIQSARDLYGSQDAASVEAAWNAVGL

SEQ ID NO: 71047 - protein, 300 aa, Bacillus amyloliquefaciens
AATTGTGTTLKGKTVSLNISSESGKYVLRDLSKPTGTQIITYDLQNREYNLPGTLVSSTTNQFTTSSQRAAVDAHYNLGKVYDYFYQKFNRNSYDNKGGKIVSSVHYGSRYNNAAWIGDQMIYGDGDHSFFSPLSGSMDVTAHEMTHGVTQETANLNYENQPGALNESFSDVFGYFNDTEDWDIGEDITVSQPALRSLSNPTKYGQPDNFKNYKNLPNTDAGDYGGVHTNSGIPNKAAYNTITKIGVNKAEQIYYRALTVYLTPSSTFKDAKAALIQSARDLYGSQDAASVEAAWNAVGL

SEQ ID NO: 71048 - protein, 300 aa, Bacillus amyloliquefaciens
AATTGTGTTLKGKTVSLNISSESGKYVLRDLSKPTGTQIITYDLQNREYNLPGTLVSSTTNQFTTSSQRAAVDAHYNLGKVYDYFYQKFNRNSYDNKGGKIVSSVHYGSRYNNAAWIGWQMIYGDGDGSFFSPLSGSMDVTAHEMTHGVTQETANLNYENQPGALNESFSDVFGYFNDTEDWDIGEDITVSQPALRSLSNPTKYGQPDNFKNYKNLPNTDAGDYGGVHTNSGIPNKAAYNTITKIGVNKAEQIYYRALTVYLTPSSTFKDAKAALIQSARDLYGSQDAASVEAAWNAVGL

SEQ ID NO: 71049 - protein, 300 aa, Bacillus amyloliquefaciens
AATTGTGTTLKGKTVSLNISSESGKYVLRDLSKPTGTQIITYDLQNREYNLPGTLVSSTTNQFTTSSQRAAVDAHYNLGKVYDYFYQKFNRNSYDNKGGKIVSSVHYGSRYNNAAWIGDQMIYGDGDGSFFSPLSGSMDVTAHEMTHGVTQLTANLNYENQPGALNESFSDVFGYFNDTEDWDIGEDITVSQPALRSLSNPTKYGQPDNFKNYKNLPNTDAGDYGGVHTNSGIPNKAAYNTITKIGVNKAEQIYYRALTVYLTPSSTFKDAKAALIQSARDLYGSQDAASVEAAWNAVGL

SEQ ID NO: 71050 - protein, 300 aa, Bacillus amyloliquefaciens
AATTGTGTTLKGKRVSLNISSESGKYVLRDLSKPTGTQIITYDLQNREYNLPGTLVSSTTNQFTTSSQRAAVDAHYNLGKVYDYFYQKFNRNSYDNKGGKIVSSVHYGSRYNNAAWIGDQMIYGDGDGSFFSPLSGSMDVTAHEMTHGVTQETANLNYENQPGALNESFSDVFGYFNDTEDWDIGEDITVSQPALRSLSNPTKYGQPDNFKNYKNLPNTDAGDYGGVHTNSGIPNKAAYNTITKIGVNKAEQIYYRALTVYLTPSSTFKDAKAALIQSARDLYGSQDAASVEAAWNAVGL

SEQ ID NO: 71051 - protein, 300 aa, Bacillus amyloliquefaciens
AATTGTGTTLKGKTVSLNISSESGKYVLRDLSKPTGTQIITYDLQNREYNLPGTLVSSTTNQFTTSSQRAAVDAHYNLGKVYDYFYQKFNRNSYDNKGGKIVSSVHYGSRYNNAAWIGDQMIYGDGDGSMFSPLSGSMDVTAHEMTHGVTQETANLNYENQPGALNESFSDVFGYFNDTEDWDIGEDITVSQPALRSLSNPTKYGQPDNFKNYKNLPNTDAGDRGGVHTNSGIPNKAAYNTITKIGVNKAEQIYYRALTVYLTPSSTFKDAKAALIQSARDLYGSQDAASVEAAWNAVGL

SEQ ID NO: 71052 - protein, 300 aa, Bacillus amyloliquefaciens
AATTGTGTTLKGKTVSLNISSESGKYVLRDLSKPTGTQIITYDLQNREYNLPGTLVSSTTNQFTTSSQRAAVDAHYNLGKVYDYFYQKFNRNSYDNKGGKIVSSVHYGSRYNNAAWIGDQMIYGDGDGSFFSPLSGSMDVTAHEMTHGVTQCTANLNYENQPGALNESFSDVFGYFNDTEDWDIGEDITVSQPALRSLSNPTKYGQPDNFKNYKNLPNTDAGDYGGVHTNSGIPNKAAYNTITKIGVNKAEQIYYRALTVYLTPSSTFKDAKAALIQSARDLYGSQDAASVEAAWNAVGL

SEQ ID NO: 71053 - protein, 300 aa, Bacillus amyloliquefaciens
AATTGTGTTLKGKTVSLNISSESGKYVLRDLSKPTGTQIITYDLQNREYNLPGTLVSSTTNQFTTSSQRAAVDAHYNLGKVYDYFYQKFNRNSYDNKGGKIVSSVHYGSRYNNAAWIGDQMIYGDGDGSFFSPLSGSMDVTAHEMTHGVTQETANLNYENQPGALNESFSDVFGYFNDTEDWDIGEDITVSQPALRSLSNPTKYYQPDNFKNYKNLPNTDAGDYGGVHTNSGIPNKAAYNTITKIGVNKAEQIYYRALTVYLTPSSTFKDAKAALIQSARDLYGSQDAASVEAAWNAVGL

SEQ ID NO: 71054 - protein, 300 aa, Bacillus amyloliquefaciens
AATTGTGTTLKGKTVSLNISSESGKYVLRDLSKPTGTQIITYDLLNREYNLPGTLVSSTTNQFTTSSQRAAVDAHYNLGKVYDYFYQKFNRNSYDNKGGKIVSSVHYGSRYNNAAWIGDQMIYGDGDGSFFSPLSGSMDVTAHEMTHGVTQETANLNYENQPGALNESFSDVFGYFNDTEDWDIGEDITVSQPALRSLSNPTKYGQPDNFKNYKNLPNTDAGDYGGVHTNSGIPNKAAYNTITKIGVNKAEQIYYRALTVYLTPSSTFKDAKAALIQSARDLYGSQDAASVEAAWNAVGL

SEQ ID NO: 71055 - protein, 300 aa, Bacillus amyloliquefaciens
AATTGTGTTLKGKTVSLNISSESGKYVLRDLSKPTGTQIITYDLQNREYNLPGTLVSSTTNQFTTSSQRAAVDAHYNLGKVYDYFYQKFNRNSYDNKGGKIVSSVHYGSRYNNAAWIGDQMIYGDGDGSFFSPLSGSMDCTAHEMTHGVTQETANLNYENQPGALNESFSDVFGYFNDTEDWDIGEDITVSQPALRSLSNPTKYGQPDNFKNYKNLPNTDAGDYGGVHTNSGIPNKAAYNTITKIGVNKAEQIYYRALTVYLTPSSTFKDAKAALIQSARDLYGSQDAASVEAAWNAVGL

SEQ ID NO: 71056 - protein, 300 aa, Bacillus amyloliquefaciens
AATTGTGTTLKGKTVSLNISSESGKYVLRDLSKPTGTQIITYDLQNKEYNLPGTLVSSTTNQFTTSSQRAAVDAHYNLGKVYDYFYQKFNRNSYDNKGGKIVSSVHYGSRYNNAAWIGDQMIYGDGDGSFFSPLSGSMDVTAHEMTHGVTQETANLNYENQPGALNESFSDVFGYFNDTEDWDIGEDITVSQPALRSLSNPTKYGQPDNFKNYKNLPNTDAGDYGGVHTNSGIPNKAAYNTITKIGVNKAEQIYYRALTVYLTPSSTFKDAKAALIQSARDLYGSQDAASVEAAWNAVGL

SEQ ID NO: 71057 - protein, 300 aa, Bacillus amyloliquefaciens
AATTGTGTTLKGKTVSLNISSESGKYVLRDLSKPTGTQIITYDLQNREYNLPGTLVSSGTNQFTTSSQRAAVDAHYNLGKVYDYFYQKFNRNSYDNKGGKIVSSVHYGSRYNNAAWIGDQMIYGDGDGSFFSPLSGSMDVTAHEMTHGVTQETANLNYENQPGALNESFSDVFGYFNDTEDWDIGEDITVSQPALRSLSNPTKYGQPDNFKNYKNLPNTDAGDYGGVHTNSGIPNKAAYNTITKIGVNKAEQIYYRALTVYLTPSSTFKDAKAALIQSARDLYGSQDAASVEAAWNAVGL

SEQ ID NO: 71058 - protein, 300 aa, Bacillus amyloliquefaciens
AATTGTGTTLKTKTVSLNISSESGKYVLRDLSKPTGTQIITYDLQNREYNLPGTLVSSTTNQFTTSSQRAAVDAHYNLGKVYDYFYQKFNRNSYDNKGGKIVSSVHYGSRYNNAAWIGDQMIYGDGDGSFFSPLSGSMDVTAHEMTHGVTQETANLNYENQPGALNESFSDVFGYFNDTEDWDIGEDITVSQPALRSLSNPTKYGQPDNFKNYKNLPNTDAGDYGGVHTNSGIPNKAAYNTITKIGVNKAEQIYYRALTVYLTPSSTFKDAKAALIQSARDLYGSQDAASVEAAWNAVGL

SEQ ID NO: 71059 - protein, 300 aa, Bacillus amyloliquefaciens
AATTGTGTTLKGKTVSLNISSESGKYVLRDLSKPTGTQIITYDLQNREYNLPGTLVSSHTNQFTTSSQRAAVDAHYNLGKVYDYFYQKFNRNSYDNKGGKIVSSVHYGSRYNNAAWIGDQMIYGDGDGSFFSPLSGSMDVTAHEMTHGVTQETANLNYENQPGALNESFSDVFGYFNDTEDWDIGEDITVSQPALRSLSNPTKYGQPDNFKNYKNLPNTDAGDYGGVHTNSGIPNKAAYNTITKIGVNKAEQIYYRALTVYLTPSSTFKDAKAALIQSARDLYGSQDAASVEAAWNAVGL

SEQ ID NO: 71060 - protein, 300 aa, Bacillus amyloliquefaciens
AATTGTGTTLKGKTVSLNISSESGKYVLRDLSKPTGTQIITYDLQNREYNLPGTLVSSTTNQFTTSSQRAAVDAHYNLGKVYDYFYQKFNRNSYDNKGGKIVSSVHYGSRYNNAAWIGDQMIYGDGDGSVFSPLSGSMDVTAHEMTHGVTQHTANLNYENQPGALNESFSDVFGYFNDTEDWDIGEDITVSQPALRSLSNPTKYGQPDNFKNYKNLPNTDAGDYGGVHTNSGIPNKAAYNTITKIGVNKAEQIYYRALTVYLTPSSTFKDAKAALIQSARDLYGSQDAASVEAAWNAVGL

SEQ ID NO: 71061 - protein, 300 aa, Bacillus amyloliquefaciens
AATTGTGTTLKGKTVSLNISSESGKYVLRDLSKPTGTQIITYDLQAREYNLPGTLVSSTTNQFTTSSQRAAVDAHYNLGKVYDYFYQKFNRNSYDNKGGKIVSSVHYGSRYNNAAWIGDQMIYGDGDGSFFSPLSGSMDVTAHEMTHGVTQETANLNYENQPGALNESFSDVFGYFNDTEDWDIGEDITVSQPALRSLSNPTKYGQPDNFKNYKNLPNTDAGDYGGVHTNSGIPNKAAYNTITKIGVNKAEQIYYRALTVYLTPSSTFKDAKAALIQSARDLYGSQDAASVEAAWNAVGL

SEQ ID NO: 71062 - protein, 300 aa, Bacillus amyloliquefaciens
AATTGTGTTLKGKTVSLNISSESGKYVLRDLSKPTGTQIITYDLQNREYLLPGTLVSSTTNQFTTSSQRAAVDAHYNLGKVYDYFYQKFNRNSYDNKGGKIVSSVHYGSRYNNAAWIGDQMIYGDGDGSFFSPLSGSMDVTAHEMTHGVTQETANLNYENQPGALNESFSDVFGYFNDTEDWDIGEDITVSQPALRSLSNPTKYGQPDNFKNYKNLPNTDAGDYGGVHTNSGIPNKAAYNTITKIGVNKAEQIYYRALTVYLTPSSTFKDAKAALIQSARDLYGSQDAASVEAAWNAVGL

SEQ ID NO: 71063 - protein, 300 aa, Bacillus amyloliquefaciens
AATTGTGTTLKGKTVSLNISSESGKYVLRDLSKPTGTQIITYDLQNREYNLPGTLVSSTTNQFTTSSQRAAVDAHYNLGKVYDYFYQKFNRNSYDNKGGKIVSSVHYGSRYNNAAWIGDQMIYGDGDGDFFSPLSGSMDVTAHEMTHGVTQETANLNYENQPGALNESFSDVFGYFNDTEDWDIGEDITVSQPALRSLSNPTKYGQPDNFKNYKNLPNTDAGDRGGVHTNSGIPNKAAYNTITKIGVNKAEQIYYRALTVYLTPSSTFKDAKAALIQSARDLYGSQDAASVEAAWNAVGL

SEQ ID NO: 71064 - protein, 300 aa, Bacillus amyloliquefaciens
AATTGTGTTLKGKTVSLNISSESGKYVLRDLSKPTGTQIITYDLQNREYNLPGTLVSSTTNQFTTSSQRAAVDAHYNLGKVYDYFYQKFNRNSYDNKGGKIVSSVHYGSRYNNAAWIGDQMIYGDGDGSLFSPLSGSMDVTAHEMTHGVTQVTANLNYENQPGALNESFSDVFGYFNDPEDWDIGEDITVSQPALRSLSNPTKYGQPDNFKNYKNLPNTDAGDYGGVHTNSGIPNKAAYNTITKIGVNKAEQIYYRALTVYLTPSSTFKDAKAALIQSARDLYGSQDAASVEAAWNAVGL

SEQ ID NO: 71065 - protein, 300 aa, Bacillus amyloliquefaciens
AATTGTGTTLKGKTVSLNISSESGKYVLRDLSKPTGTQIITYDLQNREYNLPGTLVSSTTNQFTTSSQRAAVDAHYNLGKVYDYFYQKFNRNSYDNKGGRIVSSVHYGSRYNNAAWIGDQMIYGDGDGSYFSPLSGSMDVTAHEMTHGVTQETANLNYENQPGALNESFSDVFGYFNDTEDWDIGEDITVSQPALRSLSNPTKYGQPDNFKNYKNLPNTDAGDYGGVHTNSGIPNKAAYNTITKIGVNKAEQIYYRALTVYLTPSSTFKDAKAALIQSARDLYGSQDAASVEAAWNAVGL

SEQ ID NO: 71066 - protein, 300 aa, Bacillus amyloliquefaciens
AATTGTGTTLKGKTVSLNISSESGKYVLRDLSKPTGTQIITYDLQNREYNLPGTLVSSTTNQFTTSSQRAAVDAHYNLGKVYDYFYQKFNRNSYDNKGGKIVSSVHYGSRYNNAAWIGDQMIYGDGDGSFFSPLSGSMDVTAHEMTHGVTQETANLNYENQPGALNESFSDVFGYFNDREDWDIGEDITVSQPALRSLSNPTKYGQPDNFKNYKNLPNTDAGDYGGVHTNSGIPNKAAYNTITKIGVNKAEQIYYRALTVYLTPSSTFKDAKAALIQSARDLYGSQDAASVEAAWNAVGL

SEQ ID NO: 71067 - protein, 300 aa, Bacillus amyloliquefaciens
AATTGTGTTLKGKTVSLNISSESGKYVLRDLSKPTGTQIITYDLQNREYNLPGTLVSSTTNQFTTSSQRAAVDAHYNLGKVYDYFYQKFNRNSYDNKGGKIVSSVHYGSRYNNAAWIGDQMIYGDGDGSFFSPLSGSMDVTAHEMTHGVTQETANLNYENQPGALNESFSDVFGYFNDKEDWDIGEDITVSQPALRSLSNPTKYGQPDNFKNYKNLPNTDAGDYGGVHTNSGIPNKAAYNTITKIGVNKAEQIYYRALTVYLTPSSTFKDAKAALIQSARDLYGSQDAASVEAAWNAVGL

SEQ ID NO: 71068 - protein, 300 aa, Bacillus amyloliquefaciens
AATTGTGTILKGKTVSLNISSESGKYVLRDLSKPTGTQIITYDLQNREYNLPGTLVSSTTNQFTTSSQRAAVDAHYNLGKVYDYFYQKFNRNSYDNKGGKIVSSVHYGSRYNNAAWIGDQMIYGDGDGSFFSPLSGSMDVTAHEMTHGVTQETANLNYENQPGALNESFSDVFGYFNDTEDWDIGEDITVSQPALRSLSNPTKYGQPDNFKNYKNLPNTPAGDYGGVHTNSGIPNKAAYNTITKIGVNKAEQIYYRALTVYLTPNSTFKDAKAALIQSARDLYGSQDAASVEAAWNAVGL

SEQ ID NO: 71069 - protein, 300 aa, Bacillus amyloliquefaciens
AATTGTGTTLKGKTVSLNISSESGKYVLRDLSKPTGTQIITYDLQWREYNLPGTLVSSTTNQFTTSSQRAAVDAHYNLGKVYDYFYQKFNRNSYDNKGGKIVSSVHYGSRYNNAAWIGDQMIYGDGDGSFFSPLSGSMDVTAHEMTHGVTQETANLNYENQPGALNESFSDVFGYFNDTEDWDIGEDITVSQPALRSLSNPTKYGQPDNFKNYKNLPNTDAGDYGGVHTNSGIPNKAAYNTITKIGVNKAEQIYYRALTVYLTPSSTFKDAKAALIQSARDLYGSQDAASVEAAWNAVGL

SEQ ID NO: 71070 - protein, 300 aa, Bacillus amyloliquefaciens
AATTGTGTTLKGKTVSLNISSESGKYVLRDLSKPTGTQIITYDLQNREYNLPGTLVSSTTNQFTTSSQRAAVDAHYNLGKVYDYFYQKFNRNSYDNKGGKIVSSAHYGSRYNNAAWIGDQMIYGDGDGVFFSPLSGSMDVTAHEMTHGVTQETANLNYENQPGALNESFSDVFGYFNDTEDWDIGEDITVSQPALRSLSNPTKYGQPDNFKNYKNLPNTDAGDYGGVHTNSGIPNKAAYNTITKIGVNKAEQIYYRALTVYLTPSSTFKDAKAALIQSARDLYGSQDAASVEAAWNAVGL

SEQ ID NO: 71071 - protein, 300 aa, Bacillus amyloliquefaciens
AATTGTGTTLKGKTVSLNISSESGKYVLRDLSKPTGTQIITYDLQNREYNLPGTLVSSTTNQFTTISQRAAVDAHYNLGKVYDYFYQKFNRNSYDNKGGKIVSSVHYGSRYNNAAWIGDQMIYGDGDGSFFSPLSGSMDVTAHEMTHGVTQETANLNYENQPGALNESFSDVFGYFNDTEDWDIGEDITVSQPALRSLSNPTKYGQPDNFKNYKNLPNTDAGDYGGVHTNSGIPNKAAYNTITKIGVNKAEQIYYRALTVYLTPSSTFKDAKAALIQSARDLYGSQDAASVEAAWNAVGL

SEQ ID NO: 71072 - protein, 300 aa, Bacillus amyloliquefaciens
AATTGTGTTLKGKTVSLNISSEKGKYVLRDLSKPTGTQIITYDLQNREYNLPGTLVSSTTNQFTTSSQRAAVDAHYNLGKVYDYFYQKFNRNSYDNKGGKIVSSVHYGSRYNNAAWIGDQMIYGDGDGSFFSPLSGSMDVTAHEMTHGVTQETANLNYENQPGALNESFSDVFGYFNDTEDWDIGEDITVSQPALRSLSNPTKYGQPDNFKNYKNLPNTDAGDYGGVHTNSGIPNKAAYNTITKIGVNKAEQIYYRALTVYLTPSSTFKDAKAALIQSARDLYGSQDAASVEAAWNAVGL

SEQ ID NO: 71073 - protein, 300 aa, Bacillus amyloliquefaciens
AATTGTGTTLKGKTVSLNISSESGKYVLRDLSKPTGTQIITYDLQNREYNLPGTLVSSTTNQFTTSSQRAAVDAHYNLGKVYDYFYQKFNRNSYDNKGGKIVSSVHYGSRYNNAAWIGDQMIYGDGDGSFFSPLSGSMDVTAHEMTHGVTQETANLNYENQPGALNESFSDVFGYFNDTEDWDIGEDITVSQPALRSMSNPTKYGQPDNFKNYKNLPNTDAGDYGGVHTNSGIPNKAAYNTITKIGVNKAEQIYYRALTVYLTPSSTFKDAKAALIQSARDLYGSQDAASVEAAWNAVGL

SEQ ID NO: 71074 - protein, 300 aa, Bacillus amyloliquefaciens
AATTGTGTTLKGKTVSLNISSEQGKYVLRDLSKPTGTQIITYDLQNREYNLPGTLVSSTTNQFTTSSQRAAVDAHYNLGKVYDYFYQKFNRNSYDNKGGKIVSSVHYGSRYNNAAWIGDQMIYGDGDGSFFSPLSGSMDVTAHEMTHGVTQETANLNYENQPGALNESFSDVFGYFNDTEDWDIGEDITVSQPALRSLSNPTKYGQPDNFKNYKNLPNTDAGDYGGVHTNSGIPNKAAYNTITKIGVNKAEQIYYRALTVYLTPSSTFKDAKAALIQSARDLYGSQDAASVEAAWNAVGL

SEQ ID NO: 71075 - protein, 300 aa, Bacillus amyloliquefaciens
AATTGTGTTLKGKTVSLNISSESGKYVLRDLSKPTGTQIITYDLQNREYNLPGTLVSSTTNQFTTSSQRAAVDAHYNLGKVYDYFYQKFNRNSYDNKGGKIVSSVHYGSRYNNAAWIGDQMIYGDGDGSFFSPLSGSMDVTAHEMTHGVTQETANLNYENQPGALNESFSDVFGYFNDTEDWDIGEDITVSQPALRSLSNPTKHGQPDNFKNYKNLPNTDAGDYGGVHTNSGIPNKAAYNTITKIGVNKAEQIYYRALTVYLTPSSTFKDAKAALIQSARDLYGSQDAASVEAAWNAVGL

SEQ ID NO: 71076 - protein, 300 aa, Bacillus amyloliquefaciens
AATTGTGTTLKGKTVSLNISSESGKYVLRDLSKPTGTQIITYDLQNREYNLPGTLVSSTTNQFTTSSQRAAVDAHYNLGKVYDYFYQKFNRNSYDNKGGKIVSSVHYGSRYNNAAWIGRQMIYGDGDGSFFSPLSGSMDVTAHEMTHGVTQETANLNYENQPGALNESFSDVFGYFNDTEDWDIGEDITVSQPALRSLSNPTKYGQPDNFKNYKNLPNTDAGDYGGVHTNSGIPNKAAYNTITKIGVNKAEQIYYRALTVYLTPSSTFKDAKAALIQSARDLYGSQDAASVEAAWNAVGL

SEQ ID NO: 71077 - protein, 300 aa, Bacillus amyloliquefaciens
AATTGTGTTLKGKTVSLNISSESGKYVLRDLSKPTGTQIITYDLQNREYNLPGTLVSSTTNQFTTSSQRAAVDAHYNLGKVYDYFYKKFNRNSYDNKGGKIVSSVHYGSRYNNAAWIGDQMIYGDGDGSFFSPLSGSMDVTAHEMTHGVTQETANLNYENQPGALNESFSDVFGYFNDTEDWDIGEDITVSQPALRSLSNPTKYGQPDNFKNYKNLPNTDAGDYGGVHTNSGIPNKAAYNTITKIGVNKAEQIYYRALTVYLTPSSTFKDAKAALIQSARDLYGSQDAASVEAAWNAVGL

SEQ ID NO: 71078 - protein, 300 aa, Bacillus amyloliquefaciens
AATTGTGTTLKGKTVSLNISSESGKYVLRDLSKPTGTQIITYDLQNREYNLPGTLVSSKTNQFTTNSQRAAVDAHYNLGKVYDYFYQKFNRNSYDNKGGKIVSSVHYGSRYNNAAWIGDQMIYGDGDGIFFSPLSGSMDVTAHEMTHGVTQETANLNYENQPGALNESFSDVFGYFNDTEDWDIGEDITVSQPALRSLSNPTKYGQPDNFKNYKNLPNTDAGDYGGVHTNSGIPNKAAYNTITKIGVNKAEQIYYRALTVYLTPSSTFKDAKAALIQSARDLYGSQDAASVEAAWNAVGL

SEQ ID NO: 71079 - protein, 300 aa, Bacillus amyloliquefaciens
AATTGTGTTLKGKTVSLNISSESGKYVLRDLSKPTGTQIITYDLQNREYNLPGTLVSSTTNQFTTSSQRAAVDAHYNLGKVYDYFYQKFNRNSYDNKGGKIVSSVHYGSRYNNAAWIGDQMIYGDGDGSFFSPLSGSMDVTAHEMTHGVTQETANLNYENQPGALNESFSDVFGYFNDTEDWDIGEDITVSQPALRSLSNPTKYGQPDNFRNYKNLPNTDAGDYGGVHTNSGIPNKAAYNTITKIGVNKAEQIYYRALTVYLTPSSTFKDAKAALIQSARDLYGSQDAASVEAAWNAVGL

SEQ ID NO: 71080 - protein, 300 aa, Bacillus amyloliquefaciens
AATYGTGTTLKGKTVSLNISSESGKYVLRDLSKPTGTQIITYDLQNREYNLPGTLVSSTTNQFTTSSQRAAVDAHYNLGKVYDYFYQKFNRNSYDNKGGKIVSSVHYGSRYNNAAWIGDQMIYGDGDGSFFSPLSGSMDVTAHEMTHGVTQETANLNYENQPGALNESFSDVFGYFNDTEDWDIGEDITVSQPALRSLSNPTKYGQPDNFKNYKNLPNTDAGDYGGVHTNSGIPNKAAYNTITKIGVNKAEQIYYRALTVYLTPSSTFKDAKAALIQSARDLYGSQDAASVEAAWNAVGL

SEQ ID NO: 71081 - protein, 300 aa, Bacillus amyloliquefaciens
AATHGTGTTLKGKTVSLNISSESGKYVLRDLSKPTGTQIITYDLQNREYNLPGTLVSSTTNQFTTSSQRAAVDAHYNLGKVYDYFYQKFNRNSYDNKGGKIVSSVHYGSRYNNAAWIGDQMIYGDGDGSLFSPLSGSLDVTAHEMTHGVTQFTANLNYENQPGALNESFSDVFGYFNDPEDWDIGEDITVSQPALRSLSNPTKYGQPDNFKNYKNLPNTDAGDYGGVHTNSGIPNKAAYNTITKIGVNKAEQIYYRALTVYLTPSSTFKDAKAALIQSARDLYGSQDAASVEAAWNAVGL

SEQ ID NO: 71082 - protein, 300 aa, Bacillus amyloliquefaciens
AATTGTGTTLKGKTVSLNISSEVGKYVLRDLSKPTGTQIITYDLQNREYNLPGTLVSSTTNQFTTSSQRAAVDAHYNLGKVYDYFYQKFNRNSYDNKGGKIVSSVHYGSRYNNAAWIGDQMIYGDGDGSFFSPLSGSMDVTAHEMTHGVTQETANLNYENQPGALNESFSDVFGYFNDTEDWDIGEDITVSQPALRSLSNPTKYGQPDNFKNYKNLPNTDAGDYGGVHTNSGIPNKAAYNTITKIGVNKAEQIYYRALTVYLTPSSTFKDAKAALIQSARDLYGSQDAASVEAAWNAVGL

SEQ ID NO: 71083 - protein, 300 aa, Bacillus amyloliquefaciens
AATTGTGTTLKGKTVSLNISSESGKYVLRDLSKPTGTQIITYDLQNREYNLPGTLVSSTTNQFTTSSQRAAVDAHYNLGKVYDYFYQKFNRNSYDNKGGKIVSSVHYGSRYNNAAWIGDQMIYGDGDGSFFSPLSGSMDVTAHEMTHGVTQETANLNYENQPGALNESFSDVFGYFNDTEDWDIGEDITVSQPALRSLSNPTKYGQPDNFKNYKNLPNTKAGDRGGVHTNSGIPNKAAYNTITKIGVNKAEQIYYRALTVYLTPSSTFKDAKAALIQSARDLYGSQDAASVEAAWNAVGL

SEQ ID NO: 71084 - protein, 300 aa, Bacillus amyloliquefaciens
AATTGTGTTLKGKTVSLNISSESGKYVLRDLSKPTGTQIITYDLQNREYNLPGTLVSSTTNQFTTSSQRAAVDAHYNLGKVYDYFYQKFNRNSYDNKGGKIVSSVHYGSRYNNAAWIGDQMIYGDGDGSFFSPLSGSMDVTAHEMTHGVTQETANLNYENQPGALNESFSDVFGYFNDTEDWDIGEDITVSQPALRSLSNPTKYGQPDNFKNYKNLPNTEAGDRGGVHTNSGIPNKAAYNTITKIGVNKAEQIYYRALTVYLTPSSTFKDAKAALIQSARDLYGSQDAASVEAAWNAVGL

SEQ ID NO: 71085 - protein, 300 aa, Bacillus amyloliquefaciens
AATHGTGTTLKGKTVSLNISSESGKYVLRDLSKPTGTQIITYDLQNREYNLPGTLVSSTTNQFTTSSQRAAVDAHYNLGKVYDYFYQKFNRNSYDNKGGKIVSSVHYGSRYNNAAWIGDQMIYGDGDGSLFSPLSGSLDVTAHEMTHGVTQWTANLNYENQPGALNESFSDVFGYFNDPEDWDIGEDITVSQPALRSLSNPTKYGQPDNFKNYKNLPNTDAGDYGGVHTNSGIPNKAAYNTITKIGVNKAEQIYYRALTVYLTPSSTFKDAKAALIQSARDLYGSQDAASVEAAWNAVGL

SEQ ID NO: 71086 - protein, 300 aa, Bacillus amyloliquefaciens
AATTGTGTTLKGKTVSLNISSESGKYVLRDLSKPTGTQIITYDLQNREYNLPGTLVSSTTNQFTTSSQRAAVDAHYNLGKVYDYFYQKFNRNSYDNKGGKIVSSVHYGSRYNNAAWIGDQMIYGDGDGSFFSPLSGSMDVTAHEMTHGVTQETANLNYENQPGALNESFSDVFGYFNDTEDWDIGEDITVSQPALRSLSNPTKYGQPDNFKNYKNRPNTDAGDYGGVHTNSGIPNKAAYNTITKIGVNKAEQIYYRALTVYLTPSSTFKDAKAALIQSARDLYGSQDAASVEAAWNAVGL

SEQ ID NO: 71087 - protein, 300 aa, Bacillus amyloliquefaciens
AATTGTGTTLKGKTVSLNISSESGKYVLRDLSKPTGTQIITYDLQNREYNLPGTLVSSTTNQFTTSSQRAAVDAHYNLGKVYDYFYQKFNRNSYDNKGGKIVSSVHYGSRYNNAAWIGDQMIYGDGDGSFFSPLSGSMDVTAHEMTHGVTQHTANLNYENQPGALNESFSDVFGYFNDTEDWDIGEDITVSQPALRSLSNPTKYGQPDNFKNYKNLPNTDAGDYGGVHTNSGIPNKAAYNTITKIGVNKAEQIYYRALTVYLTPSSTFKDAKAALIQSARDLYGSQDAASVEAAWNAVGL

SEQ ID NO: 71088 - protein, 300 aa, Bacillus amyloliquefaciens
AATTGTGTTLKGKTVSLNISSESGKYVLRDLSKPTGTQIITYDLQNREYNLPGTLVSSTTNQFTTSSQRAAVDAHYNLGKVYDYFYQKFNRNSYDNKGGKIVSSVHYGSRYNNAAWIGDQMIYGDGDGSFFSPLSGSMDVTAHEMTHGVTQETANLNYENQPGALNESFSDVFGYFNDTEDWDIGEDITVSQPALRSLSNPTKYGQPDNFKNYKNLPNTDMGDYGGVHTNSGIPNKAAYNTITKIGVNKAEQIYYRALTVYLTPSSTFKDAKAALIQSARDLYGSQDAASVEAAWNAVGL

SEQ ID NO: 71089 - protein, 300 aa, Bacillus amyloliquefaciens
AATTGTGTTLKGKTVSLNISSESGKYVLRDLSKPTGTQIITYDLQNREYNLPGTLVSSTTNQFTTSSQRAAVDAHYNLGKVYDYFYQKFNRNSYDNKGGKIVSSVHYGSRYNNAAWIGDQMIYGDGDGSFFSPLSGSMDVTAHEMTHGVTQETANLNYENQPGALNESFSDVFGYFNDTEDWDIGEDITFSQPALRSLSNPTKYGQPDNFKNYKNLPNTDAGDYGGVHTNSGIPNKAAYNTITKIGVNKAEQIYYRALTVYLTPWSTFKDAKAALIQSARDLYGSQDAASVEAAWNAVGL

SEQ ID NO: 71090 - protein, 300 aa, Bacillus amyloliquefaciens
AATTGTGTTLKGKTVSLNISSESGKYVLRDLSKPTGTQIITYDLQNREYNLPGTLVSSTTNQFTTSSQRAAVDAHYNLGKVYDYFYQKFNRNSYDNKGGKIVSSVHYGSRYNNAAWIGDQMIYGDGDGSIFSPLSGSLDVTAHEMTHGVTQWTANLNYENQPGALNESFSDVFGYFNDPEDWDIGEDITVSQPALRSLSNPTKYGQPDNFKNYKNLPNTDAGDYGGVHTNSGIPNKAAYNTITKIGVNKAEQIYYRALTVYLTPSSTFKDAKAALIQSARDLYGSQDAASVEAAWNAVGL

SEQ ID NO: 71091 - protein, 300 aa, Bacillus amyloliquefaciens
AATTGTGTTLKGKTVSLNISSESGKYVLRDLSKPTGTQIITYDLQNREYNLPGTLVSSTTNQFTTSSQRAAVDAHYNLGKVYDYFYQKFNRNSYDNKGGRIVSSVHYGSRYNNAAWIGDQMIYGDGDGSFFSPLSGSMDVTAHEMTHGVTQETANLNYENQPGALNESFSDVFGYFNDTEDWDIGEDITVSQPALRSLSNPTKYGQPDNFKNYKNLPNTDAGDYGGVHTNSGIPNKAAYNTITKIGVNKAEQIYYRALTVYLTPSSTFKDAKAALIQSARDLYGSQDAASVEAAWNAVGL

SEQ ID NO: 71092 - protein, 300 aa, Bacillus amyloliquefaciens
AATTGTGTTLKGKTVSLNISSESNKYVLRDLSKPTGTQIITYDLQNREYNLPGTLVSSTTNQFTTSSQRAAVDAHYNLGKVYDYFYQKFNRNSYDNKGGKIVSSVHYGSRYNNAAWIGDQMIYGDGDGSFFSPLSGSMDVTAHEMTHGVTQETANLNYENQPGALNESFSDVFGYFNDTEDWDIGEDITVSQPALRSLSNPTKYGQPDNFKNYKNLPNTDAGDYGGVHTNSGIPNKAAYNTITKIGVNKAEQIYYRALTVYLTPSSTFKDAKAALIQSARDLYGSQDAASVEAAWNAVGL

SEQ ID NO: 71093 - protein, 300 aa, Bacillus amyloliquefaciens
AATTGTGTTLKGKTVSLNISSESGKYVLRDLSKPTGTQIITYDLQNREYNLPGTLVSSTTNQFTTSSQRAAVDAHYNLGKVYDYFYQKFNRNSYDNKGGKIVSSVHYGSRYNNAAWIGDQMIYGDGDGSFFSPLSGSMDVTAHEMTHGVTQETANLNYENQPGALNESFSDVFGYFNDTEDWDIGEDITVSQPALRSLSNPTKYGQPDNFKNYKNLPNTEAGDYGGVHTNSGIPNKAAYNTITKIGVNKAEQIYYRALTVYLTPWSTFKDAKAALIQSARDLYGSQDAASVEAAWNAVGL

SEQ ID NO: 71094 - protein, 300 aa, Bacillus amyloliquefaciens
AATTGTGTTLKGKTVSLNISSESGKYVLRDLSKPTGTQIITYDLQNREYNLPGTLVSSTTNQFTTSSQRAAVDAHYNLGKVYDYFYQKFNRNSYDNKGGKIVSSVHYGSRYNNAAWIGDQMIYGDGDGSFFSPLSGSMDVTAHEMTHGVTQETANLNYENQPGALNESFSDVFGYFNDAEDWDIGEDITVSQPALRSLSNPTKYGQPDNFKNYKNLPNTDAGDYGGVHTNSGIPNKAAYNTITKIGVNKAEQIYYRALTVYLTPSSTFKDAKAALIQSARDLYGSQDAASVEAAWNAVGL

SEQ ID NO: 71095 - protein, 300 aa, Bacillus amyloliquefaciens
AATTGTGTTLKGKTVSLNISSESGKYVLRDLSKPTGTQIITYDLQNREYNLPGTLVSSTTNQFTTSSQRAAVDAHYNLGKVYDYFYQKFNRNSYDNKGGKIVSSVHYGSRYNNAAWIGDQMIYGDGDGSFFSPLSGSMDVTAHEMTHGVTQETADLNYENQPGALNESFSDVFGYFNDTEDWDIGEDITVSQPALRSLSNPTKYGQPDNFKNYKNLPNTDAGDYGGVHTNSGIPNKAAYNTITKIGVNKAEQIYYRALTVYLTPSSTFKDAKAALIQSARDLYGSQDAASVEAAWNAVGL

SEQ ID NO: 71096 - protein, 300 aa, Bacillus amyloliquefaciens
AATTGTGTTLKGKTVSLNISSESGKYVLRDLSKPTGTQIITYDLQNREYNLPGTLVSSTTNQFTTSSQRAAVDAHYNLGKVYDYFYQKFNRNSYDNKGGKIVSSVHYGSRYNNAAWIGDQMIYGDGDGSFFSPLSGSMDVTAHEMTHGVTQETANLNYENQPGALNESFSDVFGYFNDTEDWDIGEDITVSQPALRSLSNPTKYMQPDNFKNYKNLPNTDAGDYGGVHTNSGIPNKAAYNTITKIGVNKAEQIYYRALTVYLTPSSTFKDAKAALIQSARDLYGSQDAASVEAAWNAVGL

SEQ ID NO: 71097 - protein, 300 aa, Bacillus amyloliquefaciens
AATTGTGTTLKGKTVSLNISSESGKYVLRDLSKPTGTQIITYDLQNREYNLPGTLVSSITNQFTTSSQRAAVDAHYNLGKVYDYFYQKFNRNSYDNKGGKIVSSVHYGSRYNNAAWIGDQMIYGDGDGSFFSPLSGSMDVTAHEMTHGVTQETANLNYENQPGALNESFSDVFGYFNDTEDWDIGEDITVSQPALRSLSNPTKYGQPDNFKNYKNLPNTDAGDYGGVHTNSGIPNKAAYNTITKIGVNKAEQIYYRALTVYLTPSSTFKDAKAALIQSARDLYGSQDAASVEAAWNAVGL

SEQ ID NO: 71098 - protein, 300 aa, Bacillus amyloliquefaciens
AATTGTGTTLKGKTVSLNISSESGKYVLRDLSKPTGTQIITYDLQNREYNLPGTLVSSTTNQFTTSSQRAAVDAHYNLGKVYDYFYQKFNRNSYDNKGGKIVSSVHYGSRYNNAAWIGDQMIYGDGDGSFFSPLSGSMDVTAHEMTHGVTQETANLNYENQPGALNESFSDVFGYFNDTEDWDIGEDITLSQPALRSLSNPTKYGQPDNFKNYKNLPNTDAGDRGGVHTNSGIPNKAAYNTITKIGVNKAEQIYYRALTVYLTPSSTFKDAKAALIQSARDLYGSQDAASVEAAWNAVGL

SEQ ID NO: 71099 - protein, 300 aa, Bacillus amyloliquefaciens
AATTGTGTTLKGKTVSLNISSESGKYVLRDLSKPTGTQIITYDLTNREYNLPGTLVSSTTNQFTTSSQRAAVDAHYNLGKVYDYFYQKFNRNSYDNKGGKIVSSVHYGSRYNNAAWIGDQMIYGDGDGSFFSPLSGSMDVTAHEMTHGVTQETANLNYENQPGALNESFSDVFGYFNDTEDWDIGEDITVSQPALRSLSNPTKYGQPDNFKNYKNLPNTDAGDYGGVHTNSGIPNKAAYNTITKIGVNKAEQIYYRALTVYLTPSSTFKDAKAALIQSARDLYGSQDAASVEAAWNAVGL

SEQ ID NO: 71100 - protein, 300 aa, Bacillus amyloliquefaciens
AATTGTGTTLKGKTVSLNISSESGKYVLRDLSKPTGTQIITYDLQNREYNLPGTLVSSTTNQFTTSSQRAAVDAHYNLGKVYDYFYQKFNRNSYDNKGGKIVSSVHYGSRYNNAAWIGDQMIYGDGDGSFFSPLSGSMDVTAHEMTHGVTQDTANLNYENQPGALNESFSDVFGYFNDTEDWDIGEDITVSQPALRSLSNPTKYGQPDNFKNYKNLPNTDAGDYGGVHTNSGIPNKAAYNTITKIGVNKAEQIYYRALTVYLTPSSTFKDAKAALIQSARDLYGSQDAASVEAAWNAVGL

SEQ ID NO: 71101 - protein, 300 aa, Bacillus amyloliquefaciens
AATTGTGTTLKGKVVSLNISSESGKYVLRDLSKPTGTQIITYDLQNREYNLPGTLVSSTTNQFTTSSQRAAVDAHYNLGKVYDYFYQKFNRNSYDNKGGKIVSSVHYGSRYNNAAWIGDQMIYGDGDGSFFSPLSGSMDVTAHEMTHGVTQETANLNYENQPGALNESFSDVFGYFNDTEDWDIGEDITVSQPALRSLSNPTKYGQPDNFKNYKNLPNTDAGDYGGVHTNSGIPNKAAYNTITKIGVNKAEQIYYRALTVYLTPSSTFKDAKAALIQSARDLYGSQDAASVEAAWNAVGL

SEQ ID NO: 71102 - protein, 300 aa, Bacillus amyloliquefaciens
AATTGTGTTLKGKTVSLNISSESGKYVLRDLSKPTGTQIITYDLINREYNLPGTLVSSTTNQFTTSSQRAAVDAHYNLGKVYDYFYQKFNRNSYDNKGGKIVSSVHYGSRYNNAAWIGDQMIYGDGDGSFFSPLSGSMDVTAHEMTHGVTQETANLNYENQPGALNESFSDVFGYFNDTEDWDIGEDITVSQPALRSLSNPTKYGQPDNFKNYKNLPNTDAGDYGGVHTNSGIPNKAAYNTITKIGVNKAEQIYYRALTVYLTPSSTFKDAKAALIQSARDLYGSQDAASVEAAWNAVGL

SEQ ID NO: 71103 - protein, 300 aa, Bacillus amyloliquefaciens
AATTGTGTTLKGKLVSLNISSESGKYVLRDLSKPTGTQIITYDLQNREYNLPGTLVSSTTNQFTTSSQRAAVDAHYNLGKVYDYFYQKFNRNSYDNKGGKIVSSVHYGSRYNNAAWIGDQMIYGDGDGSFFSPLSGSMDVTAHEMTHGVTQETANLNYENQPGALNESFSDVFGYFNDTEDWDIGEDITVSQPALRSLSNPTKYGQPDNFKNYKNLPNTDAGDYGGVHTNSGIPNKAAYNTITKIGVNKAEQIYYRALTVYLTPSSTFKDAKAALIQSARDLYGSQDAASVEAAWNAVGL

SEQ ID NO: 71104 - protein, 300 aa, Bacillus amyloliquefaciens
AATTGTGTTLKGKTVSLNISSESGKYVLRDLSKPTGTQIITYDLQNREYNLPGTLVSSKTNQFTTSSQRAAVDAHYNLGKVYDYFYQKFNRNSYDNKGGKIVSSVHYGSRYNNAAWIGDQMIYGDGDGSFFSPLSGSMDVTAHEMTHGVTQETANLNYENQPGALNESFSDVFGYFNDTEDWDIGEDITVSQPALRSLSNPTKYGQPDNFKNYKNLPNTDAGDYGGVHTNSGIPNKAAYNTITKIGVNKAEQIYYRALTVYLTPSSTFKDAKAALIQSARDLYGSQDAASVEAAWNAVGL

SEQ ID NO: 71105 - protein, 300 aa, Bacillus amyloliquefaciens
AATTGTGTTLKGKTVSLNISSESFKYVLRDLSKPTGTQIITYDLQNREYNLPGTLVSSTTNQFTTSSQRAAVDAHYNLGKVYDYFYQKFNRNSYDNKGGKIVSSVHYGSRYNNAAWIGDQMIYGDGDGSFFSPLSGSMDVTAHEMTHGVTQETANLNYENQPGALNESFSDVFGYFNDTEDWDIGEDITVSQPALRSLSNPTKYGQPDNFKNYKNLPNTDAGDYGGVHTNSGIPNKAAYNTITKIGVNKAEQIYYRALTVYLTPSSTFKDAKAALIQSARDLYGSQDAASVEAAWNAVGL

SEQ ID NO: 71106 - protein, 300 aa, Bacillus amyloliquefaciens
AATTGTGTTLKGKTVSLNISSESGKYVLRDLSKPTGTQIITYDLQNREYNLPGTLVSSKTNQFTTSSQRAAVDAHYNLGKVYDYFYQKFNRNSYDNKGGKIVSSVHYGSRYNNAAWIGDQMIYGDGDGQFFSPLSGSMDVTAHEMTHGVTQETANLNYENQPGALNESFSDVFGYFNDTEDWDIGEDITVSQPALRSLSNPTKYGQPDNFKNYKNLPNTDAGDYGGVHTNSGIPNKAAYNTITKIGVNKAEQIYYRALTVYLTPSSTFKDAKAALIQSARDLYGSQDAASVEAAWNAVGL

SEQ ID NO: 71107 - protein, 300 aa, Bacillus amyloliquefaciens
AATTGTGTTLKGKTVSLNISSESGKYVLRDLSKPTGTQIITYDLQNREYRLPGTLVSSTTNQFTTSSQRAAVDAHYNLGKVYDYFYQKFNRNSYDNKGGKIVSSVHYGSRYNNAAWIGDQMIYGDGDGSFFSPLSGSMDVTAHEMTHGVTQETANLNYENQPGALNESFSDVFGYFNDTEDWDIGEDITVSQPALRSLSNPTKYGQPDNFKNYKNLPNTDAGDYGGVHTNSGIPNKAAYNTITKIGVNKAEQIYYRALTVYLTPSSTFKDAKAALIQSARDLYGSQDAASVEAAWNAVGL

SEQ ID NO: 71108 - protein, 300 aa, Bacillus amyloliquefaciens
AATTGTGTTLKGKTVSLNISSESGKYVLRDLSKPTGTQIITYDLQNREYNLPGTLVSSTFNQFTTSSQRAAVDAHYNLGKVYDYFYQKFNRNSYDNKGGKIVSSVHYGSRYNNAAWIGDQMIYGDGDGSFFSPLSGSMDVTAHEMTHGVTQETANLNYENQPGALNESFSDVFGYFNDTEDWDIGEDITVSQPALRSLSNPTKYGQPDNFKNYKNLPNTDAGDYGGVHTNSGIPNKAAYNTITKIGVNKAEQIYYRALTVYLTPSSTFKDAKAALIQSARDLYGSQDAASVEAAWNAVGL

SEQ ID NO: 71109 - protein, 300 aa, Bacillus amyloliquefaciens
AATTGTGTTLKGKTVSLNISSESGKYVLRDLSKPTGTQIITYDLQNREYNLPGTLVSSTTNQFTTQSQRAAVDAHYNLGKVYDYFYQKFNRNSYDNKGGKIVSSVHYGSRYNNAAWIGDQMIYGDGDGSFFSPLSGSMDVTAHEMTHGVTQETANLNYENQPGALNESFSDVFGYFNDTEDWDIGEDITVSQPALRSLSNPTKYGQPDNFKNYKNLPNTDAGDYGGVHTNSGIPNKAAYNTITKIGVNKAEQIYYRALTVYLTPSSTFKDAKAALIQSARDLYGSQDAASVEAAWNAVGL

SEQ ID NO: 71110 - protein, 300 aa, Bacillus amyloliquefaciens
AATTGTGTTLKGKTVSLNISSESGKYVLRDLSKPTGTQIITYDLQNREYNLPGTLVSSTTNQFTTSSQRAAVDAHYNLGKVYDYFYQKFNRNSYDNKGGKIVSSVHYGSRYNNAAWIGDQMIYGDGDGSFFSPLSGSMDVTAHEMTHGVTQETANLNYENQPGALNESFSDVFGYFNDMEDWDIGEDITVSQPALRSLSNPTKYGQPDNFKNYKNLPNTDAGDYGGVHTNSGIPNKAAYNTITKIGVNKAEQIYYRALTVYLTPSSTFKDAKAALIQSARDLYGSQDAASVEAAWNAVGL

SEQ ID NO: 71111 - protein, 300 aa, Bacillus amyloliquefaciens
AATVGTGTTLKGKTVSLNISSESGKYVLRDLSKPTGTQIITYDLQNREYNLPGTLVSSTTNQFTTSSQRAAVDAHYNLGKVYDYFYQKFNRNSYDNKGGKIVSSVHYGSRYNNAAWIGDQMIYGDGDGSFFSPLSGSMDVTAHEMTHGVTQETANLNYENQPGALNESFSDVFGYFNDTEDWDIGEDITVSQPALRSLSNPTKYGQPDNFKNYKNLPNTDAGDYGGVHTNSGIPNKAAYNTITKIGVNKAEQIYYRALTVYLTPSSTFKDAKAALIQSARDLYGSQDAASVEAAWNAVGL

SEQ ID NO: 71112 - protein, 300 aa, Bacillus amyloliquefaciens
AATTGTGTTLKGKTVSLNISSESGKYVLRDLSKPTGTQIITYDLQNREYNLPGTLVSSWTNQFTTSSQRAAVDAHYNLGKVYDYFYQKFNRNSYDNKGGKIVSSVHYGSRYNNAAWIGDQMIYGDGDGSFFSPLSGSMDVTAHEMTHGVTQETANLNYENQPGALNESFSDVFGYFNDTEDWDIGEDITVSQPALRSLSNPTKYGQPDNFKNYKNLPNTDAGDYGGVHTNSGIPNKAAYNTITKIGVNKAEQIYYRALTVYLTPSSTFKDAKAALIQSARDLYGSQDAASVEAAWNAVGL

SEQ ID NO: 71113 - protein, 300 aa, Bacillus amyloliquefaciens
AATTGTGTTLKGKTVSLNISSESGKYVLRDLSKPTGTQIITYDLQNREYNLPGTLVSSTTNQFTTSSQRAAVDAHYNLGKVYDYFYQKFNRNSYDNKGGKIVSSVHYGSRYNNAAWIGDQMIYGDGDGSFFSPLSGSMDVTAHEMTHGVTQGTANLNYENQPGALNESFSDVFGYFNDTEDWDIGEDITVSQPALRSLSNPTKYGQPDNFKNYKNLPNTDAGDYGGVHTNSGIPNKAAYNTITKIGVNKAEQIYYRALTVYLTPSSTFKDAKAALIQSARDLYGSQDAASVEAAWNAVGL

SEQ ID NO: 71114 - protein, 300 aa, Bacillus amyloliquefaciens
AATTGTGTTLKGKTVSLNISSESGKYVLRDLSKPTGTQIITYDLQNREYNLPGTLVSSTTNQFTTKSQRAAVDAHYNLGKVYDYFYQKFNRNSYDNKGGKIVSSVHYGSRYNNAAWIGDQMIYGDGDGSFFSPLSGSMDVTAHEMTHGVTQETANLNYENQPGALNESFSDVFGYFNDTEDWDIGEDITVSQPALRSLSNPTKYGQPDNFKNYKNLPNTDAGDYGGVHTNSGIPNKAAYNTITKIGVNKAEQIYYRALTVYLTPSSTFKDAKAALIQSARDLYGSQDAASVEAAWNAVGL

SEQ ID NO: 71115 - protein, 300 aa, Bacillus amyloliquefaciens
AATTGTGTTLKGKTVSLNISSESGKYVLRDLSKPTGTQIITYDLQFREYNLPGTLVSSTTNQFTTSSQRAAVDAHYNLGKVYDYFYQKFNRNSYDNKGGKIVSSVHYGSRYNNAAWIGDQMIYGDGDGSFFSPLSGSMDVTAHEMTHGVTQETANLNYENQPGALNESFSDVFGYFNDTEDWDIGEDITVSQPALRSLSNPTKYGQPDNFKNYKNLPNTDAGDYGGVHTNSGIPNKAAYNTITKIGVNKAEQIYYRALTVYLTPSSTFKDAKAALIQSARDLYGSQDAASVEAAWNAVGL

SEQ ID NO: 71116 - protein, 300 aa, Bacillus amyloliquefaciens
AATTGTGTTLKGKTVSLNISSESGKYVLRDLSKPTGTQIITYDLQNREYNLPGTLVSSTTNQFTTHSQRAAVDAHYNLGKVYDYFYQKFNRNSYDNKGGKIVSSVHYGSRYNNAAWIGDQMIYGDGDGSFFSPLSGSMDVTAHEMTHGVTQETANLNYENQPGALNESFSDVFGYFNDTEDWDIGEDITVSQPALRSLSNPTKYGQPDNFKNYKNLPNTDAGDYGGVHTNSGIPNKAAYNTITKIGVNKAEQIYYRALTVYLTPSSTFKDAKAALIQSARDLYGSQDAASVEAAWNAVGL

SEQ ID NO: 71117 - protein, 300 aa, Bacillus amyloliquefaciens
AATTGTGTTLKGKTVSLNISSESGKYVLRDLSKPTGTQIITYDLQNREYNLPGTLVSSTTNQFTTLSQRAAVDAHYNLGKVYDYFYQKFNRNSYDNKGGKIVSSVHYGSRYNNAAWIGDQMIYGDGDGSFFSPLSGSMDVTAHEMTHGVTQETANLNYENQPGALNESFSDVFGYFNDTEDWDIGEDITVSQPALRSLSNPTKYGQPDNFKNYKNLPNTDAGDYGGVHTNSGIPNKAAYNTITKIGVNKAEQIYYRALTVYLTPSSTFKDAKAALIQSARDLYGSQDAASVEAAWNAVGL

SEQ ID NO: 71118 - protein, 300 aa, Bacillus amyloliquefaciens
AATTGTGTTLKGKTVSLNISSESGKYVLRDLSKPTGTQIITYDLQNREYNLPGTLVSSTTNQFTTSSQRAAVDAHYNLGKVYDYFYQKFNRNSYDNKGGKIVSSVHYGSRYNNAAWIGDQMIYGDGDGSFFSPLSGSMDVTAHEMTHGVTQETANLNYENQPGALNESFSDVFGYFNDTEDWDIGEDITLSQPALRSLSNPTKYGQPDNFKNYKNLPNTDAGDYGGVHTNSGIPNKAAYNTITKIGVNKAEQIYYRALTVYLTPQSTFKDAKAALIQSARDLYGSQDAASVEAAWNAVGL

SEQ ID NO: 71119 - protein, 300 aa, Bacillus amyloliquefaciens
AATTGTGTTLKGKTVSLNISSESGKYVLRDLSKPTGTQIITYDLQKREYNLPGTLVSSTTNQFTTSSQRAAVDAHYNLGKVYDYFYQKFNRNSYDNKGGKIVSSVHYGSRYNNAAWIGDQMIYGDGDGSFFSPLSGSMDVTAHEMTHGVTQETANLNYENQPGALNESFSDVFGYFNDTEDWDIGEDITVSQPALRSLSNPTKYGQPDNFKNYKNLPNTDAGDYGGVHTNSGIPNKAAYNTITKIGVNKAEQIYYRALTVYLTPSSTFKDAKAALIQSARDLYGSQDAASVEAAWNAVGL

SEQ ID NO: 71120 - protein, 300 aa, Bacillus amyloliquefaciens
AATTGTGTTLKGKTVSLNISSESGKYVLRDLSKPTGTQIITYDLQNREYNLPGTLVSSTTNQFTTSSQRAAVDAHYNLGKVYDYFYQKFNRNSYDNKGGKIVSSVHYGSRYNNAAWIGDQMIYGDGDGSFFSPLSGSMDVTAHEMTHGVTQETAKLNYENQPGALNESFSDVFGYFNDTEDWDIGEDITVSQPALRSLSNPTKYGQPDNFKNYKNLPNTDAGDYGGVHTNSGIPNKAAYNTITKIGVNKAEQIYYRALTVYLTPSSTFKDAKAALIQSARDLYGSQDAASVEAAWNAVGL

SEQ ID NO: 71121 - protein, 300 aa, Bacillus amyloliquefaciens
AATTGTGTTLKGKTVSLNISSESGKYVLRDLSKPTGTQIITYDLQNREYNLPGTLVSSTTNQFTTSSQRAAVDAHYNLGKVYDYFYQKFNRNSYDNHGGKIVSSVHYGSRYNNAAWIGDQMIYGDGDGSFFSPLSGSMDVTAHEMTHGVTQETANLNYENQPGALNESFSDVFGYFNDTEDWDIGEDITVSQPALRSLSNPTKYGQPDNFKNYKNLPNTDAGDYGGVHTNSGIPNKAAYNTITKIGVNKAEQIYYRALTVYLTPSSTFKDAKAALIQSARDLYGSQDAASVEAAWNAVGL

SEQ ID NO: 71122 - protein, 300 aa, Bacillus amyloliquefaciens
AATTGTGTTLKVKTVSLNISSESGKYVLRDLSKPTGTQIITYDLQNREYNLPGTLVSSTTNQFTTSSQRAAVDAHYNLGKVYDYFYQKFNRNSYDNKGGKIVSSVHYGSRYNNAAWIGDQMIYGDGDGSFFSPLSGSMDVTAHEMTHGVTQETANLNYENQPGALNESFSDVFGYFNDTEDWDIGEDITVSQPALRSLSNPTKYGQPDNFKNYKNLPNTDAGDYGGVHTNSGIPNKAAYNTITKIGVNKAEQIYYRALTVYLTPSSTFKDAKAALIQSARDLYGSQDAASVEAAWNAVGL

SEQ ID NO: 71123 - protein, 300 aa, Bacillus amyloliquefaciens
AATTGTGTTLKGKTVSLNISSESGKYVLRDLSKPTGTQIITYDLQNREYNLPGTLVSSTTNQFTTQSQRAAVDAHYNLGKVYDYFYQKFNRNSYDNKGGKIVSSVHYGSRYNNAAWIGDQMIYGDGDGVFFSPLSGSMDVTAHEMTHGVTQETANLNYENQPGALNESFSDVFGYFNDTEDWDIGEDITVSQPALRSLSNPTKYGQPDNFKNYKNLPNTDAGDYGGVHTNSGIPNKAAYNTITKIGVNKAEQIYYRALTVYLTPSSTFKDAKAALIQSARDLYGSQDAASVEAAWNAVGL

SEQ ID NO: 71124 - protein, 300 aa, Bacillus amyloliquefaciens
AATTGTGTTLKGKTVSLNISSEMGKYVLRDLSKPTGTQIITYDLQNREYNLPGTLVSSTTNQFTTSSQRAAVDAHYNLGKVYDYFYQKFNRNSYDNKGGKIVSSVHYGSRYNNAAWIGDQMIYGDGDGSFFSPLSGSMDVTAHEMTHGVTQETANLNYENQPGALNESFSDVFGYFNDTEDWDIGEDITVSQPALRSLSNPTKYGQPDNFKNYKNLPNTDAGDYGGVHTNSGIPNKAAYNTITKIGVNKAEQIYYRALTVYLTPSSTFKDAKAALIQSARDLYGSQDAASVEAAWNAVGL

SEQ ID NO: 71125 - protein, 300 aa, Bacillus amyloliquefaciens
AATTGTGTTLKGKTVSLNISSESGKYVLRDLSKPTGTQIITYDLQNREYNLPGTLVSSKTNQFTTQSQRAAVDAHYNLGKVYDYFYQKFNRNSYDNKGGKIVSSVHYGSRYNNAAWIGDQMIYGDGDGIFFSPLSGSMDVTAHEMTHGVTQETANLNYENQPGALNESFSDVFGYFNDTEDWDIGEDITVSQPALRSLSNPTKYGQPDNFKNYKNLPNTDAGDYGGVHTNSGIPNKAAYNTITKIGVNKAEQIYYRALTVYLTPSSTFKDAKAALIQSARDLYGSQDAASVEAAWNAVGL

SEQ ID NO: 71126 - protein, 300 aa, Bacillus amyloliquefaciens
AATTGTGTTLKGKTVSLNISSESGKYVLRDLSKPTGTQIITYDLQNREYNLPGTLVSSTTNQFTTSSQRAAVDAHYNLGKVYDYFYQKFNRNSYDNKGGKIVSSVHYGSRYNNAAWIGDQMIYGDGDGSFFSPLSGSMDVTAHEMTHGVTQETANLNYENQPGALNESFSDVFGYFNDQEDWDIGEDITVSQPALRSLSNPTKYGQPDNFKNYKNLPNTDAGDYGGVHTNSGIPNKAAYNTITKIGVNKAEQIYYRALTVYLTPSSTFKDAKAALIQSARDLYGSQDAASVEAAWNAVGL

SEQ ID NO: 71127 - protein, 300 aa, Bacillus amyloliquefaciens
AATTGTGTTLKGKTVSLNISSESGKYVLRDLSKPTGTQIITYDLQNREYNLPGTLVSSLTNQFTTSSQRAAVDAHYNLGKVYDYFYQKFNRNSYDNKGGKIVSSVHYGSRYNNAAWIGDQMIYGDGDGSFFSPLSGSMDVTAHEMTHGVTQETANLNYENQPGALNESFSDVFGYFNDTEDWDIGEDITVSQPALRSLSNPTKYGQPDNFKNYKNLPNTDAGDYGGVHTNSGIPNKAAYNTITKIGVNKAEQIYYRALTVYLTPSSTFKDAKAALIQSARDLYGSQDAASVEAAWNAVGL

SEQ ID NO: 71128 - protein, 300 aa, Bacillus amyloliquefaciens
AATTGTGTTLKDKTVSLNISSESGKYVLRDLSKPTGTQIITYDLQNREYNLPGTLVSSTTNQFTTSSQRAAVDAHYNLGKVYDYFYQKFNRNSYDNKGGKIVSSVHYGSRYNNAAWIGDQMIYGDGDGSFFSPLSGSMDVTAHEMTHGVTQETANLNYENQPGALNESFSDVFGYFNDTEDWDIGEDITVSQPALRSLSNPTKYGQPDNFKNYKNLPNTDAGDYGGVHTNSGIPNKAAYNTITKIGVNKAEQIYYRALTVYLTPSSTFKDAKAALIQSARDLYGSQDAASVEAAWNAVGL

SEQ ID NO: 71129 - protein, 300 aa, Bacillus amyloliquefaciens
AATTGTGTTLKGKTVSLNISSESGKYVLRDLSKPTGTQIITYDLQNRERNLPGTLVSSTTNQFTTSSQRAAVDAHYNLGKVYDYFYQKFNRNSYDNKGGKIVSSVHYGSRYNNAAWIGDQMIYGDGDGSFFSPLSGSMDVTAHEMTHGVTQETANLNYENQPGALNESFSDVFGYFNDTEDWDIGEDITVSQPALRSLSNPTKYGQPDNFKNYKNLPNTDAGDYGGVHTNSGIPNKAAYNTITKIGVNKAEQIYYRALTVYLTPSSTFKDAKAALIQSARDLYGSQDAASVEAAWNAVGL

SEQ ID NO: 71130 - protein, 300 aa, Bacillus amyloliquefaciens
AATTGTGTTLKGKTVSLNISSESMKYVLRDLSKPTGTQIITYDLQNREYNLPGTLVSSTTNQFTTSSQRAAVDAHYNLGKVYDYFYQKFNRNSYDNKGGKIVSSVHYGSRYNNAAWIGDQMIYGDGDGSFFSPLSGSMDVTAHEMTHGVTQETANLNYENQPGALNESFSDVFGYFNDTEDWDIGEDITVSQPALRSLSNPTKYGQPDNFKNYKNLPNTDAGDYGGVHTNSGIPNKAAYNTITKIGVNKAEQIYYRALTVYLTPSSTFKDAKAALIQSARDLYGSQDAASVEAAWNAVGL

SEQ ID NO: 71131 - protein, 300 aa, Bacillus amyloliquefaciens
AATTGTGTTLKGKTVSLNISSESGKYVLRDLSKPTGTQIITYDLQNREWNLPGTLVSSTTNQFTTSSQRAAVDAHYNLGKVYDYFYQKFNRNSYDNKGGKIVSSVHYGSRYNNAAWIGDQMIYGDGDGSFFSPLSGSMDVTAHEMTHGVTQETANLNYENQPGALNESFSDVFGYFNDTEDWDIGEDITVSQPALRSLSNPTKYGQPDNFKNYKNLPNTDAGDYGGVHTNSGIPNKAAYNTITKIGVNKAEQIYYRALTVYLTPSSTFKDAKAALIQSARDLYGSQDAASVEAAWNAVGL

SEQ ID NO: 71132 - protein, 300 aa, Bacillus amyloliquefaciens
AATTGTGTTLKGKTVSLNISSESGKYVLRDLSKPTGTQIITYDLQNREYNLPGTLVSSRTNQFTTSSQRAAVDAHYNLGKVYDYFYQKFNRNSYDNKGGKIVSSVHYGSRYNNAAWIGDQMIYGDGDGQFFSPLSGSMDVTAHEMTHGVTQETANLNYENQPGALNESFSDVFGYFNDTEDWDIGEDITVSQPALRSLSNPTKYGQPDNFKNYKNLPNTDAGDYGGVHTNSGIPNKAAYNTITKIGVNKAEQIYYRALTVYLTPSSTFKDAKAALIQSARDLYGSQDAASVEAAWNAVGL

SEQ ID NO: 71133 - protein, 300 aa, Bacillus amyloliquefaciens
AATTGTGTTLKGKTVSLNISSESGKYVLRDLSKPTGTQIITYDLQTREYNLPGTLVSSTTNQFTTSSQRAAVDAHYNLGKVYDYFYQKFNRNSYDNKGGKIVSSVHYGSRYNNAAWIGDQMIYGDGDGSFFSPLSGSMDVTAHEMTHGVTQETANLNYENQPGALNESFSDVFGYFNDTEDWDIGEDITVSQPALRSLSNPTKYGQPDNFKNYKNLPNTDAGDYGGVHTNSGIPNKAAYNTITKIGVNKAEQIYYRALTVYLTPSSTFKDAKAALIQSARDLYGSQDAASVEAAWNAVGL

SEQ ID NO: 71134 - protein, 300 aa, Bacillus amyloliquefaciens
AATTGTGTTLKGKTVSLNISSESGKYVLRDLSKPTGTQIITYDLQRREYNLPGTLVSSTTNQFTTSSQRAAVDAHYNLGKVYDYFYQKFNRNSYDNKGGKIVSSVHYGSRYNNAAWIGDQMIYGDGDGSFFSPLSGSMDVTAHEMTHGVTQETANLNYENQPGALNESFSDVFGYFNDTEDWDIGEDITVSQPALRSLSNPTKYGQPDNFKNYKNLPNTDAGDYGGVHTNSGIPNKAAYNTITKIGVNKAEQIYYRALTVYLTPSSTFKDAKAALIQSARDLYGSQDAASVEAAWNAVGL

SEQ ID NO: 71135 - protein, 300 aa, Bacillus amyloliquefaciens
AATTGTGTTLKGKTVSLNISSESGKYVLRDLSKPTGTQIITYDLQNREYNLPGTLVSSTTNQFTTSSQRAAVDAHYNLGKVYDYFYQKFNRNSYDNKGGKIVSSVHYGSRYNNAAWIGDQMIYGDGDGSFFSPLSGSMDVTAHEMTHGVTQETANLNYENQPGALNESFSDVFGYFNDTEDWDIGEDITVSQPALRSLNNPTKYGQPDNFKNYKNLPNTDAGDYGGVHTNSGIPNKAAYNTITKIGVNKAEQIYYRALTVYLTPSSTFKDAKAALIQSARDLYGSQDAASVEAAWNAVGL

SEQ ID NO: 71136 - protein, 300 aa, Bacillus amyloliquefaciens
AATTGTGTTLKGKTVSLNISSESGKYVLRDLSKPTGTQIITYDLQNREYNLPGTLVSSTDNQFTTSSQRAAVDAHYNLGKVYDYFYQKFNRNSYDNKGGKIVSSVHYGSRYNNAAWIGDQMIYGDGDGSFFSPLSGSMDVTAHEMTHGVTQETANLNYENQPGALNESFSDVFGYFNDTEDWDIGEDITVSQPALRSLSNPTKYGQPDNFKNYKNLPNTDAGDYGGVHTNSGIPNKAAYNTITKIGVNKAEQIYYRALTVYLTPSSTFKDAKAALIQSARDLYGSQDAASVEAAWNAVGL

SEQ ID NO: 71137 - protein, 300 aa, Bacillus amyloliquefaciens
AATTGTGTTLKGKTVSLNISSESGKYVLRDLSKPTGTQIITYDLQNREYNLPGTLVSSTTNQFTTSSQRAAVDAHYNLGKVYDYFYRKFNRNSYDNKGGKIVSSVHYGSRYNNAAWIGDQMIYGDGDGSFFSPLSGSMDVTAHEMTHGVTQETANLNYENQPGALNESFSDVFGYFNDTEDWDIGEDITVSQPALRSLSNPTKYGQPDNFKNYKNLPNTDAGDYGGVHTNSGIPNKAAYNTITKIGVNKAEQIYYRALTVYLTPSSTFKDAKAALIQSARDLYGSQDAASVEAAWNAVGL

SEQ ID NO: 71138 - protein, 300 aa, Bacillus amyloliquefaciens
AATTGTGTTLKGKTVSLNISSESGKYVLRDLSKPTGTQIITYDLQNREYNLPGTLVSSTTNQFTVSSQRAAVDAHYNLGKVYDYFYQKFNRNSYDNKGGKIVSSVHYGSRYNNAAWIGDQMIYGDGDGSFFSPLSGSMDVTAHEMTHGVTQETANLNYENQPGALNESFSDVFGYFNDTEDWDIGEDITVSQPALRSLSNPTKYGQPDNFKNYKNLPNTDAGDYGGVHTNSGIPNKAAYNTITKIGVNKAEQIYYRALTVYLTPSSTFKDAKAALIQSARDLYGSQDAASVEAAWNAVGL

SEQ ID NO: 71139 - protein, 300 aa, Bacillus amyloliquefaciens
AATTGTGTTLKGKTVSLNISSESGKYVLRDLSKPTGTQIITYDLQNREYNLPGTLVSSTTNQFTTSSQRAAVDAHYNLGKVYDYFYQKFNRNSYDNKGGKIVSSVHYGSRYNNAAWIGVQMIYGDGDGSFFSPLSGSMDVTAHEMTHGVTQETANLNYENQPGALNESFSDVFGYFNDTEDWDIGEDITVSQPALRSLSNPTKYGQPDNFKNYKNLPNTDAGDYGGVHTNSGIPNKAAYNTITKIGVNKAEQIYYRALTVYLTPSSTFKDAKAALIQSARDLYGSQDAASVEAAWNAVGL

SEQ ID NO: 71140 - protein, 300 aa, Bacillus amyloliquefaciens
AATTGTGTTLKGKTVSLNISSESGKYVLRDLSKPTGTQIITYDLQNREYNLPGTLVSSTTNQFTTSSQRAAVDAHYNLGKVYDYFYQKFNRNSYDNKGGKIVSSVHYGSRYNNAAWIGDQMIYGDGDGSFFSPLSGSMDVTAHEMTHGVTQETANLNYENQPGALNESFSDVFGYFNDTEDWDIGEDITVSQPALRSLSNPTKYGQPDNFKNYKNLPNTDNGDYGGVHTNSGIPNKAAYNTITKIGVNKAEQIYYRALTVYLTPSSTFKDAKAALIQSARDLYGSQDAASVEAAWNAVGL

SEQ ID NO: 71141 - protein, 300 aa, Bacillus amyloliquefaciens
AATTGTGTTLKEKTVSLNISSESGKYVLRDLSKPTGTQIITYDLQNREYNLPGTLVSSTTNQFTTNSQRAAVDAHYNLGKVYDYFYQKFNRNSYDNKGGKIVSSVHYGSRYNNAAWIGDQMIYGDGDGIFFSPLSGSMDVTAHEMTHGVTQETANLNYENQPGALNESFSDVFGYFNDTEDWDIGEDITVSQPALRSLSNPTKYGQPDNFKNYKNLPNTDAGDYGGVHTNSGIPNKAAYNTITKIGVNKAEQIYYRALTVYLTPSSTFKDAKAALIQSARDLYGSQDAASVEAAWNAVGL

SEQ ID NO: 71142 - protein, 300 aa, Bacillus amyloliquefaciens
AATTGTGTTLKGKKVSLNISSESGKYVLRDLSKPTGTQIITYDLQNREYNLPGTLVSSTTNQFTTSSQRAAVDAHYNLGKVYDYFYQKFNRNSYDNKGGKIVSSVHYGSRYNNAAWIGDQMIYGDGDGSFFSPLSGSMDVTAHEMTHGVTQETANLNYENQPGALNESFSDVFGYFNDTEDWDIGEDITVSQPALRSLSNPTKYGQPDNFKNYKNLPNTDAGDYGGVHTNSGIPNKAAYNTITKIGVNKAEQIYYRALTVYLTPSSTFKDAKAALIQSARDLYGSQDAASVEAAWNAVGL

SEQ ID NO: 71143 - protein, 300 aa, Bacillus amyloliquefaciens
AATTGTGTTLKGKTVSLNISSESGKYVLRDLSKPTGTQIITYDLQNREYNLPGTLVSSTTNQFTTSSQRAAVDAHYNLGKVYDYFYQKFNRNSYDGKGGKIVSSVHYGSRYNNAAWIGDQMIYGDGDGSFFSPLSGSMDVTAHEMTHGVTQETANLNYENQPGALNESFSDVFGYFNDTEDWDIGEDITVSQPALRSLSNPTKYGQPDNFKNYKNLPNTDAGDYGGVHTNSGIPNKAAYNTITKIGVNKAEQIYYRALTVYLTPSSTFKDAKAALIQSARDLYGSQDAASVEAAWNAVGL

SEQ ID NO: 71144 - protein, 300 aa, Bacillus amyloliquefaciens
AATTGTGTTLKGKTVSLNISSESGKYVLRDLSKPTGTQIITYDLQNREYNLPGTLVSSTTNQFTTSSQRAAVDAHYNLGKVYDYFYQKFNRNSYDNKGGKIVSSVHYGSRYNNAAWIGDQMIYGDGDGSFFSPLSGSMDVTAHEMTHGVTIETANLNYENQPGALNESFSDVFGYFNDTEDWDIGEDITVSQPALRSLSNPTKYGQPDNFKNYKNLPNTDAGDYGGVHTNSGIPNKAAYNTITKIGVNKAEQIYYRALTVYLTPSSTFKDAKAALIQSARDLYGSQDAASVEAAWNAVGL

SEQ ID NO: 71145 - protein, 300 aa, Bacillus amyloliquefaciens
AATTGTGTTLKGKTVSLNISSESGKYVLRDLSKPTGTQIITYDLQGREYNLPGTLVSSTTNQFTTSSQRAAVDAHYNLGKVYDYFYQKFNRNSYDNKGGKIVSSVHYGSRYNNAAWIGDQMIYGDGDGSFFSPLSGSMDVTAHEMTHGVTQETANLNYENQPGALNESFSDVFGYFNDTEDWDIGEDITVSQPALRSLSNPTKYGQPDNFKNYKNLPNTDAGDYGGVHTNSGIPNKAAYNTITKIGVNKAEQIYYRALTVYLTPSSTFKDAKAALIQSARDLYGSQDAASVEAAWNAVGL

SEQ ID NO: 71146 - protein, 300 aa, Bacillus amyloliquefaciens
AATTGTGTTLKGKTVSLNISSESGKYVLRDLSKPTGTQIITYDLQNREYNLPGTLVSSVTNQFTTSSQRAAVDAHYNLGKVYDYFYQKFNRNSYDNKGGKIVSSVHYGSRYNNAAWIGDQMIYGDGDGSFFSPLSGSMDVTAHEMTHGVTQETANLNYENQPGALNESFSDVFGYFNDTEDWDIGEDITVSQPALRSLSNPTKYGQPDNFKNYKNLPNTDAGDYGGVHTNSGIPNKAAYNTITKIGVNKAEQIYYRALTVYLTPSSTFKDAKAALIQSARDLYGSQDAASVEAAWNAVGL

SEQ ID NO: 71147 - protein, 300 aa, Bacillus amyloliquefaciens
AATTGTGTTLKGKTVSLNISSESGKYVLRDLSKPTGTQIITYDLQNREYNLPGTLVSSNTNQFTTSSQRAAVDAHYNLGKVYDYFYQKFNRNSYDNKGGKIVSSVHYGSRYNNAAWIGDQMIYGDGDGSFFSPLSGSMDVTAHEMTHGVTQETANLNYENQPGALNESFSDVFGYFNDTEDWDIGEDITVSQPALRSLSNPTKYGQPDNFKNYKNLPNTDAGDYGGVHTNSGIPNKAAYNTITKIGVNKAEQIYYRALTVYLTPSSTFKDAKAALIQSARDLYGSQDAASVEAAWNAVGL

SEQ ID NO: 71148 - protein, 300 aa, Bacillus amyloliquefaciens
AATTGTGTTLKGKTVSLNISSESGKYVLRDLSKPTGTQIITYDLQNREYNLPGTLVSSTTNQFTTSSQRAAVDAHYNLGKVYDYFYQKFNRNSYDNKGGKIVSSVHYGSRYNNAAWIGDQMIYGDGDGSFFSPLSGSMDVTAHEMTHGVTQETANLNYENQPGALNESFSDVFGYFNDTEDWDIGEDITVSQPALRSLLNPTKYGQPDNFKNYKNLPNTDAGDYGGVHTNSGIPNKAAYNTITKIGVNKAEQIYYRALTVYLTPSSTFKDAKAALIQSARDLYGSQDAASVEAAWNAVGL

SEQ ID NO: 71149 - protein, 300 aa, Bacillus amyloliquefaciens
AATTGTGTTLKGKTVSLNISSESGKYVLRDLSKPTGTQIITYDLQNREYNLPGTLVSSTTNQFTTYSQRAAVDAHYNLGKVYDYFYQKFNRNSYDNKGGKIVSSVHYGSRYNNAAWIGDQMIYGDGDGSFFSPLSGSMDVTAHEMTHGVTQETANLNYENQPGALNESFSDVFGYFNDTEDWDIGEDITVSQPALRSLSNPTKYGQPDNFKNYKNLPNTDAGDYGGVHTNSGIPNKAAYNTITKIGVNKAEQIYYRALTVYLTPSSTFKDAKAALIQSARDLYGSQDAASVEAAWNAVGL

SEQ ID NO: 71150 - protein, 300 aa, Bacillus amyloliquefaciens
AATTGTGTTLKGKTVSLNISSESGKYVLRDLSKPTGTQIITYDLQNREYNLPGHLVSSTTNQFTTSSQRAAVDAHYNLGKVYDYFYQKFNRNSYDNKGGKIVSSVHYGSRYNNAAWIGDQMIYGDGDGSFFSPLSGSMDVTAHEMTHGVTQETANLNYENQPGALNESFSDVFGYFNDTEDWDIGEDITVSQPALRSLSNPTKYGQPDNFKNYKNLPNTDAGDYGGVHTNSGIPNKAAYNTITKIGVNKAEQIYYRALTVYLTPSSTFKDAKAALIQSARDLYGSQDAASVEAAWNAVGL

SEQ ID NO: 71151 - protein, 300 aa, Bacillus amyloliquefaciens
AATHGTGTTLKGKTVSLNISSESGKYVLRDLSKPTGTQIITYDLQNREYNLPGTLVSSTTNQFTTSSQRAAVDAHYNLGKVYDYFYQKFNRNSYDNKGGKIVSSVHYGSRYNNAAWIGDQMIYGDGDGSFFSPLSGSMDVTAHEMTHGVTQETANLNYENQPGALNESFSDVFGYFNDTEDWDIGEDITVSQPALRSLSNPTKYGQPDNFKNYKNLPNTDAGDYGGVHTNSGIPNKAAYNTITKIGVNKAEQIYYRALTVYLTPSSTFKDAKAALIQSARDLYGSQDAASVEAAWNAVGL

SEQ ID NO: 71152 - protein, 300 aa, Bacillus amyloliquefaciens
AATTGTGTTLKGKTVSLNISSESGKYVLRDLSKPTGTQIITYDLQNREYWLPGTLVSSTTNQFTTSSQRAAVDAHYNLGKVYDYFYQKFNRNSYDNKGGKIVSSVHYGSRYNNAAWIGDQMIYGDGDGSFFSPLSGSMDVTAHEMTHGVTQETANLNYENQPGALNESFSDVFGYFNDTEDWDIGEDITVSQPALRSLSNPTKYGQPDNFKNYKNLPNTDAGDYGGVHTNSGIPNKAAYNTITKIGVNKAEQIYYRALTVYLTPSSTFKDAKAALIQSARDLYGSQDAASVEAAWNAVGL

SEQ ID NO: 71153 - protein, 300 aa, Bacillus amyloliquefaciens
AATTGTGTTLKGKTVSLNISSESGKYVLRDLSKPTGTQIITYDLQNREYNLPGTLVSSRTNQFTTNSQRAAVDAHYNLGKVYDYFYQKFNRNSYDNKGGKIVSSVHYGSRYNNAAWIGDQMIYGDGDGIFFSPLSGSMDVTAHEMTHGVTQETANLNYENQPGALNESFSDVFGYFNDTEDWDIGEDITVSQPALRSLSNPTKYGQPDNFKNYKNLPNTDAGDYGGVHTNSGIPNKAAYNTITKIGVNKAEQIYYRALTVYLTPSSTFKDAKAALIQSARDLYGSQDAASVEAAWNAVGL

SEQ ID NO: 71154 - protein, 300 aa, Bacillus amyloliquefaciens
AATTGTGTTLKGKTVSLNISSESGKYVLRDLSKPTGTQIITYDLQNREYNLPGTLVSSTTNQFTTSSQRAAVDAHYNLGKVYDYFYQKFNRNSYDNKGGKIVSSVHYGSRYNNAAWIGLQMIYGDGDGSFFSPLSGSMDVTAHEMTHGVTQETANLNYENQPGALNESFSDVFGYFNDTEDWDIGEDITVSQPALRSLSNPTKYGQPDNFKNYKNLPNTDAGDYGGVHTNSGIPNKAAYNTITKIGVNKAEQIYYRALTVYLTPSSTFKDAKAALIQSARDLYGSQDAASVEAAWNAVGL

SEQ ID NO: 71155 - protein, 300 aa, Bacillus amyloliquefaciens
AATTGTGTTLKGKTVSLNISSESGKYVLRDLSKPTGTQIITYDLQNREYNLPGTLVSSTTNQFTKSSQRAAVDAHYNLGKVYDYFYQKFNRNSYDNKGGKIVSSVHYGSRYNNAAWIGDQMIYGDGDGSFFSPLSGSMDVTAHEMTHGVTQETANLNYENQPGALNESFSDVFGYFNDTEDWDIGEDITVSQPALRSLSNPTKYGQPDNFKNYKNLPNTDAGDYGGVHTNSGIPNKAAYNTITKIGVNKAEQIYYRALTVYLTPSSTFKDAKAALIQSARDLYGSQDAASVEAAWNAVGL

SEQ ID NO: 71156 - protein, 300 aa, Bacillus amyloliquefaciens
AATTGTGTTLKGKTVSLNISSEPGKYVLRDLSKPTGTQIITYDLQNREYNLPGTLVSSTTNQFTTSSQRAAVDAHYNLGKVYDYFYQKFNRNSYDNKGGKIVSSVHYGSRYNNAAWIGDQMIYGDGDGSFFSPLSGSMDVTAHEMTHGVTQETANLNYENQPGALNESFSDVFGYFNDTEDWDIGEDITVSQPALRSLSNPTKYGQPDNFKNYKNLPNTDAGDYGGVHTNSGIPNKAAYNTITKIGVNKAEQIYYRALTVYLTPSSTFKDAKAALIQSARDLYGSQDAASVEAAWNAVGL

SEQ ID NO: 71157 - protein, 300 aa, Bacillus amyloliquefaciens
AATTGTGTTLKGKTVSLNISSESGKYVLRDLSKPTGTQIITYDLQNREYNLPGTLVSSTTNQFTTSSQRAAVDAHYNLGKVYDYFYQKFNRNSYDNKGGKIVSSVHYGSRYNNAAWIGDQMIYGDGDGSFFSPLSGSMDVTAHEMTHGVTQETANLNYENQPGALNESFSDVFGYFNDTEDWDIGEDITVSQPALRSLSNPTKYGQPDNFKNYKNLPNTDAGDRGGVHTNSGIPNKAAYNTITKIGVNKAEQIYYRALTVYLTPSSTFKDAKAALIQSARDLYGSQDAASVEAAWNAVGL

SEQ ID NO: 71158 - protein, 300 aa, Bacillus amyloliquefaciens
AATTGTGTTLKGKTVSLNISSESGKYVLRDLSKPTGTQIITYDLNNREYNLPGTLVSSTTNQFTTSSQRAAVDAHYNLGKVYDYFYQKFNRNSYDNKGGKIVSSVHYGSRYNNAAWIGDQMIYGDGDGSFFSPLSGSMDVTAHEMTHGVTQETANLNYENQPGALNESFSDVFGYFNDTEDWDIGEDITVSQPALRSLSNPTKYGQPDNFKNYKNLPNTDAGDYGGVHTNSGIPNKAAYNTITKIGVNKAEQIYYRALTVYLTPSSTFKDAKAALIQSARDLYGSQDAASVEAAWNAVGL

SEQ ID NO: 71159 - protein, 300 aa, Bacillus amyloliquefaciens
AATTGTGTTLKGKTVSLNISSESGKYVLRDLSKPTGTQIITYDLQNREYNLPGTLVSSTTNQFTTSSQRAAVDAHYNLGKVYDYFYMKFNRNSYDNKGGKIVSSVHYGSRYNNAAWIGDQMIYGDGDGSFFSPLSGSMDVTAHEMTHGVTQETANLNYENQPGALNESFSDVFGYFNDTEDWDIGEDITVSQPALRSLSNPTKYGQPDNFKNYKNLPNTDAGDYGGVHTNSGIPNKAAYNTITKIGVNKAEQIYYRALTVYLTPSSTFKDAKAALIQSARDLYGSQDAASVEAAWNAVGL

SEQ ID NO: 71160 - protein, 300 aa, Bacillus amyloliquefaciens
AATTGTGTTLKGKTVSLNISSESGKYVLRDLSKPTGTQIITYDLQNREYILPGTLVSSTTNQFTTSSQRAAVDAHYNLGKVYDYFYQKFNRNSYDNKGGKIVSSVHYGSRYNNAAWIGDQMIYGDGDGSFFSPLSGSMDVTAHEMTHGVTQETANLNYENQPGALNESFSDVFGYFNDTEDWDIGEDITVSQPALRSLSNPTKYGQPDNFKNYKNLPNTDAGDYGGVHTNSGIPNKAAYNTITKIGVNKAEQIYYRALTVYLTPSSTFKDAKAALIQSARDLYGSQDAASVEAAWNAVGL

SEQ ID NO: 71161 - protein, 300 aa, Bacillus amyloliquefaciens
AATTGTGTTLKGKTVSLNISSESGKYVLRDLSKPTGTQIITYDLQNREYNLPGTLVSSTTNQFTTSSQRAAVDAHYNLGKVYDYFYQKFNRNSYDNKGGKIVSSVHYGSRYNNAAWIGDQMIYGDGDGSFFSPLSGSMDVTAHEMTHGVTQETANLNYENQPGALNESFSDVFGYFNDTEDWDIGEDITVSQPALRSLSNPTKYGQPDNFKNYKNLPNTDVGDYGGVHTNSGIPNKAAYNTITKIGVNKAEQIYYRALTVYLTPSSTFKDAKAALIQSARDLYGSQDAASVEAAWNAVGL

SEQ ID NO: 71162 - protein, 300 aa, Bacillus amyloliquefaciens
AATTGTGTTLKGKTVSLNISSESGKYVLRDLSKPTGTQIITYDLQNREYNLPGTLVSSTTNQFTTSSQRAAVDAHYNLGKVYDYFYQKFNRNSYDNKGGKIVSSVHYGSRYNNAAWIGDQMIYGDGDGSFFSPLSGSMDVTAHEMTHGVTQETANLNYENQPGALNESFSDVFGYFNDTEDWDIGEDITVSQPALRSLKNPTKYGQPDNFKNYKNLPNTDAGDYGGVHTNSGIPNKAAYNTITKIGVNKAEQIYYRALTVYLTPSSTFKDAKAALIQSARDLYGSQDAASVEAAWNAVGL

SEQ ID NO: 71163 - protein, 300 aa, Bacillus amyloliquefaciens
AATTGTGTTLKGKTVSLNISSESGKYVLRDLSKPTGTQIITYDLQNREYNLPGTLVSSTTNQFTTSSQRAAVDAHYNLGKVYDYFYQKFNRNSYDNKGGKIVSSVHYGSRYNNAAWIGDQMIYGDGDGSIFSPLSGSLDVTAHEMTHGVTQFTANLNYENQPGALNESFSDVFGYFNDPEDWDIGEDITVSQPALRSLSNPTKYGQPDNFKNYKNLPNTDAGDYGGVHTNSGIPNKAAYNTITKIGVNKAEQIYYRALTVYLTPSSTFKDAKAALIQSARDLYGSQDAASVEAAWNAVGL

SEQ ID NO: 71164 - protein, 300 aa, Bacillus amyloliquefaciens
AATTGTGTTLKGKTVSLNISSESGKYVLRDLSKPTGTQIITYDLQQREYNLPGTLVSSTTNQFTTSSQRAAVDAHYNLGKVYDYFYQKFNRNSYDNKGGKIVSSVHYGSRYNNAAWIGDQMIYGDGDGSFFSPLSGSMDVTAHEMTHGVTQETANLNYENQPGALNESFSDVFGYFNDTEDWDIGEDITVSQPALRSLSNPTKYGQPDNFKNYKNLPNTDAGDYGGVHTNSGIPNKAAYNTITKIGVNKAEQIYYRALTVYLTPSSTFKDAKAALIQSARDLYGSQDAASVEAAWNAVGL

SEQ ID NO: 71165 - protein, 300 aa, Bacillus amyloliquefaciens
AATTGTGTTLKLKTVSLNISSESGKYVLRDLSKPTGTQIITYDLQNREYNLPGTLVSSTTNQFTTSSQRAAVDAHYNLGKVYDYFYQKFNRNSYDNKGGKIVSSVHYGSRYNNAAWIGDQMIYGDGDGSFFSPLSGSMDVTAHEMTHGVTQETANLNYENQPGALNESFSDVFGYFNDTEDWDIGEDITVSQPALRSLSNPTKYGQPDNFKNYKNLPNTDAGDYGGVHTNSGIPNKAAYNTITKIGVNKAEQIYYRALTVYLTPSSTFKDAKAALIQSARDLYGSQDAASVEAAWNAVGL

SEQ ID NO: 71166 - protein, 300 aa, Bacillus amyloliquefaciens
AATTGTGTTLKGKTVSLNISSESGKYVLRDLSKPTGTQIITYDLQNREYNLPGTLVSSTTNQFTTSSQRAAVDAHYNLGKVYDYFYQKFNRNSYDNKGGKIVSSVHYGSRYNNAAWIGDQMIYGDGDGSFFSPLSGSLDVTAHEMSHGVTQFTANLNYENQPGALNESFSDVFGYFNDTEDWDIGEDITVSQPALRSLSNPTKYGQPDNFKNYKNLPNTDAGDYGGVHTNSGIPNKAAYNTITKIGVNKAEQIYYRALTVYLTPSSTFKDAKAALIQSARDLYGSQDAASVEAAWNAVGL

SEQ ID NO: 71167 - protein, 300 aa, Bacillus amyloliquefaciens
AATTGTGTTLKGKTVSLNISSESGKYVLRDLSKPTGTQIITYDLQNREYNLPGTLVSSTTNQFTTSSQRAAVDAHYNLGKVYDYFYQKFNRNSYDNKGGKIVSSVHYGSRYNNAAWIGDQMIYGDGDGSFFSPLSGSMDVTAHEMTHGVTQETANLNYENQPGALNESFSDVFGYFNDTEDWDIGEDITVSQPALRSLINPTKYGQPDNFKNYKNLPNTDAGDYGGVHTNSGIPNKAAYNTITKIGVNKAEQIYYRALTVYLTPSSTFKDAKAALIQSARDLYGSQDAASVEAAWNAVGL

SEQ ID NO: 71168 - protein, 300 aa, Bacillus amyloliquefaciens
AATTGTGTTLKGKTVSLNISSESGKYVLRDLSKPTGTQIITYDLQHREYNLPGTLVSSTTNQFTTSSQRAAVDAHYNLGKVYDYFYQKFNRNSYDNKGGKIVSSVHYGSRYNNAAWIGDQMIYGDGDGSFFSPLSGSMDVTAHEMTHGVTQETANLNYENQPGALNESFSDVFGYFNDTEDWDIGEDITVSQPALRSLSNPTKYGQPDNFKNYKNLPNTDAGDYGGVHTNSGIPNKAAYNTITKIGVNKAEQIYYRALTVYLTPSSTFKDAKAALIQSARDLYGSQDAASVEAAWNAVGL

SEQ ID NO: 71169 - protein, 300 aa, Bacillus amyloliquefaciens
AATTGTGTTLKGKTVSLNISSESGKYVLRDLSKPTGTQIITYDLQNREYNLPGTLVSSTTNQFTTNSQRAAVDAHYNLGKVYDYFYQKFNRNSYDNKGGKIVSSVHYGSRYNNAAWIGDQMIYGDGDGQFFSPLSGSMDVTAHEMTHGVTQETANLNYENQPGALNESFSDVFGYFNDTEDWDIGEDITVSQPALRSLSNPTKYGQPDNFKNYKNLPNTDAGDYGGVHTNSGIPNKAAYNTITKIGVNKAEQIYYRALTVYLTPSSTFKDAKAALIQSARDLYGSQDAASVEAAWNAVGL

SEQ ID NO: 71170 - protein, 300 aa, Bacillus amyloliquefaciens
AATTGTGTTLKGKTVSLNISSESGKYVLRDLSKPTGTQIITYDLQLREYNLPGTLVSSTTNQFTTSSQRAAVDAHYNLGKVYDYFYQKFNRNSYDNKGGKIVSSVHYGSRYNNAAWIGDQMIYGDGDGSFFSPLSGSMDVTAHEMTHGVTQETANLNYENQPGALNESFSDVFGYFNDTEDWDIGEDITVSQPALRSLSNPTKYGQPDNFKNYKNLPNTDAGDYGGVHTNSGIPNKAAYNTITKIGVNKAEQIYYRALTVYLTPSSTFKDAKAALIQSARDLYGSQDAASVEAAWNAVGL

SEQ ID NO: 71171 - protein, 300 aa, Bacillus amyloliquefaciens
AATTGTGTTLKGKTVSLNISSESGKYVLRDLSKPTGTQIITYDLQNREYNLPGTLVSSTTNQFTTSSQRAAVDAHYNLGKVYDYFYQKFNRNSYDNKGGKIVSSVHYGSRYNNAAWIGDQMIYGDGDGSFFSPLSGSMDVTAHEMTHGVTQETANLNYENQPGALNESFSDVFGYFNDTEDWDIGEDITLSQPALRSLSNPTKYGQPDNFKNYKNLPNTEAGDYGGVHTNSGIPNKAAYNTITKIGVNKAEQIYYRALTVYLTPQSTFKDAKAALIQSARDLYGSQDAASVEAAWNAVGL

SEQ ID NO: 71172 - protein, 300 aa, Bacillus amyloliquefaciens
AATTGTGTTLKGKTVSLNISSESGKYVLRDLSKPTGTQIITYDLQNREYNLPGTLVSSTTNQFTTSSQRAAVDAHYNLGKVYDYFYQKFNRNSYDNKGGKIVSSVHYGSRYNNAAWIGDQMIYGDGDGSFFSPLSGSMDVTAHEMTHGVTQETANLNYENQPGALNESFSDVFGYFNDSEDWDIGEDITVSQPALRSLSNPTKYGQPDNFKNYKNLPNTDAGDYGGVHTNSGIPNKAAYNTITKIGVNKAEQIYYRALTVYLTPSSTFKDAKAALIQSARDLYGSQDAASVEAAWNAVGL

SEQ ID NO: 71173 - protein, 300 aa, Bacillus amyloliquefaciens
AATTGTGTTLKGKTVSLNISSESGKYVLRDLSKPTGTQIITYDLQNREYNLPGTLVSSTTNQFTTSSQRAAVDAHYNLGKVYDYFYNKFNRNSYDNKGGKIVSSVHYGSRYNNAAWIGDQMIYGDGDGSFFSPLSGSMDVTAHEMTHGVTQETANLNYENQPGALNESFSDVFGYFNDTEDWDIGEDITVSQPALRSLSNPTKYGQPDNFKNYKNLPNTDAGDYGGVHTNSGIPNKAAYNTITKIGVNKAEQIYYRALTVYLTPSSTFKDAKAALIQSARDLYGSQDAASVEAAWNAVGL

SEQ ID NO: 71174 - protein, 300 aa, Bacillus amyloliquefaciens
AATTGTGTTLKGKTVSLNISSESGKYVLRDLSKPTGTQIITYDLQNREYNLPGTLVSSTTNQFTTSSQRAAVDAHYNLGKVYDYFYQKFNRNSYDNKGGKIVSSVHYGSRYNNAAWIGDQMIYGDGDGSFFSPLSGSMDVTAHEMTHGVTQATANLNYENQPGALNESFSDVFGYFNDTEDWDIGEDITVSQPALRSLSNPTKYGQPDNFKNYKNLPNTDAGDYGGVHTNSGIPNKAAYNTITKIGVNKAEQIYYRALTVYLTPSSTFKDAKAALIQSARDLYGSQDAASVEAAWNAVGL

SEQ ID NO: 71175 - protein, 300 aa, Bacillus amyloliquefaciens
AATTGTGTTLKGKTVSLNISSESGKYVLRDLSKPTGTQIITYDLQNREYNLPGTLVSSTTNQFTTSSQRAAVDAHYNLGKVYDYFYQKFNRNSYDNKGGKIVSSVHYGSRYNNAAWIGDQMIYGDGDGSIFSPLSGSMDVTAHEMTHGVTQHTANLNYENQPGALNESFSDVFGYFNDTEDWDIGEDITVSQPALRSLSNPTKYGQPDNFKNYKNLPNTDAGDYGGVHTNSGIPNKAAYNTITKIGVNKAEQIYYRALTVYLTPSSTFKDAKAALIQSARDLYGSQDAASVEAAWNAVGL

SEQ ID NO: 71176 - protein, 300 aa, Bacillus amyloliquefaciens
AATTGTGTTLKGKTVSLNISSESGKYVLRDLSKPTGTQIITYDLQNREYNLPGTLVSSTTNQFTTSSQRAAVDAHYNLGKVYDYFYQKFNRNSYDNKGGKIVSSVHYGSRYNNAAWIGDQMIYGDGDGSFFSPLSGSMDVTAHEMTHGVTQETANLNYENQPGALNESFSDVFGYFNDTEDWDIGEDITVSQPALRSLSNPTKYGQPDNFKNYQNLPNTDAGDYGGVHTNSGIPNKAAYNTITKIGVNKAEQIYYRALTVYLTPSSTFKDAKAALIQSARDLYGSQDAASVEAAWNAVGL

SEQ ID NO: 71177 - protein, 300 aa, Bacillus amyloliquefaciens
AATTGTGTTLKGKTVSLNISSESKKYVLRDLSKPTGTQIITYDLQNREYNLPGTLVSSTTNQFTTSSQRAAVDAHYNLGKVYDYFYQKFNRNSYDNKGGKIVSSVHYGSRYNNAAWIGDQMIYGDGDGSFFSPLSGSMDVTAHEMTHGVTQETANLNYENQPGALNESFSDVFGYFNDTEDWDIGEDITVSQPALRSLSNPTKYGQPDNFKNYKNLPNTDAGDYGGVHTNSGIPNKAAYNTITKIGVNKAEQIYYRALTVYLTPSSTFKDAKAALIQSARDLYGSQDAASVEAAWNAVGL

SEQ ID NO: 71178 - protein, 300 aa, Bacillus amyloliquefaciens
AATTGTGTTLKGKTVSLNISSESGKYVLRDLSKPTGTQIITYDLQNREYNLPGTLVSSTTNQFTRSSQRAAVDAHYNLGKVYDYFYQKFNRNSYDNKGGKIVSSVHYGSRYNNAAWIGDQMIYGDGDGSFFSPLSGSMDVTAHEMTHGVTQETANLNYENQPGALNESFSDVFGYFNDTEDWDIGEDITVSQPALRSLSNPTKYGQPDNFKNYKNLPNTDAGDYGGVHTNSGIPNKAAYNTITKIGVNKAEQIYYRALTVYLTPSSTFKDAKAALIQSARDLYGSQDAASVEAAWNAVGL

SEQ ID NO: 71179 - protein, 300 aa, Bacillus amyloliquefaciens
AATTGTGTTLKGKTVSLNISSESGKYVLRDLSKPTGTQIITYDLQNREYNLPGTLVSNTTNQFTTSSQRAAVDAHYNLGKVYDYFYQKFNRNSYDNKGGKIVSSVHYGSRYNNAAWIGDQMIYGDGDGSFFSPLSGSMDVTAHEMTHGVTQETANLNYENQPGALNESFSDVFGYFNDTEDWDIGEDITVSQPALRSLSNPTKYGQPDNFKNYKNLPNTDAGDYGGVHTNSGIPNKAAYNTITKIGVNKAEQIYYRALTVYLTPSSTFKDAKAALIQSARDLYGSQDAASVEAAWNAVGL

SEQ ID NO: 71180 - protein, 300 aa, Bacillus amyloliquefaciens
AATTGTGTTLKGKTVSLNISSESGKYVLRDLSKPTGTQIITYDLQNREYNLPGTLVSSTTNQFTTSSQRAAVDAHYNLGKVYDYFYQKFNRNSYDNKGGKIVSSVHYGSRYNNAAWIGDQMIYGDGDGSFFSPLSGSMDVTAHEMTHGVTQETANLNYENQPGALNESFSDVFGYFNDTEDWDIGEDITVSQPALRSLSNPTKYGQPDNFKNYKNLPNTDARDYGGVHTNSGIPNKAAYNTITKIGVNKAEQIYYRALTVYLTPSSTFKDAKAALIQSARDLYGSQDAASVEAAWNAVGL

SEQ ID NO: 71181 - protein, 300 aa, Bacillus amyloliquefaciens
AATTGTGTTLKGKTVSLNISSESGKYVLRDLSKPTGTQIITYDLQNREINLPGTLVSSTTNQFTTSSQRAAVDAHYNLGKVYDYFYQKFNRNSYDNKGGKIVSSVHYGSRYNNAAWIGDQMIYGDGDGSFFSPLSGSMDVTAHEMTHGVTQETANLNYENQPGALNESFSDVFGYFNDTEDWDIGEDITVSQPALRSLSNPTKYGQPDNFKNYKNLPNTDAGDYGGVHTNSGIPNKAAYNTITKIGVNKAEQIYYRALTVYLTPSSTFKDAKAALIQSARDLYGSQDAASVEAAWNAVGL

SEQ ID NO: 71182 - protein, 300 aa, Bacillus amyloliquefaciens
AATTGTGTTLKGKTVSLNISSESGKYVLRDLSKPTGTQIITYDLQNREYNLPGTLVSSTKNQFTTSSQRAAVDAHYNLGKVYDYFYQKFNRNSYDNKGGKIVSSVHYGSRYNNAAWIGDQMIYGDGDGSFFSPLSGSMDVTAHEMTHGVTQETANLNYENQPGALNESFSDVFGYFNDTEDWDIGEDITVSQPALRSLSNPTKYGQPDNFKNYKNLPNTDAGDYGGVHTNSGIPNKAAYNTITKIGVNKAEQIYYRALTVYLTPSSTFKDAKAALIQSARDLYGSQDAASVEAAWNAVGL

SEQ ID NO: 71183 - protein, 300 aa, Bacillus amyloliquefaciens
AATTGTGTTLKGKTVSLNISSESGKYVLRDLSKPTGTQIITYDLQNREYNLPGTLVSSTTNQFTTSSQRAAVDAHYNLGKVYDYFYQKFNRNSYDNKGGKIVSSVHYGSRYNNAAWIGDQMIYGDGDGQFFSPLSGSMDVTAHEMTHGVTQETANLNYENQPGALNESFSDVFGYFNDTEDWDIGEDITVSQPALRSLSNPTKYGQPDNFKNYKNLPNTDAGDYGGVHTNSGIPNKAAYNTITKIGVNKAEQIYYRALTVYLTPSSTFKDAKAALIQSARDHYGSQDAASVEAAWNAVGL

SEQ ID NO: 71184 - protein, 300 aa, Bacillus amyloliquefaciens
AATTGTGTTLKGKTVSLNISSESGKYVLRDLSKPTGTQIITYDLQNREYNLPGTLVSSTTNQFTTSSQRAAVDAHYNLGKVYDYFYQKFNRNSYDNWGGKIVSSVHYGSRYNNAAWIGDQMIYGDGDGSFFSPLSGSMDVTAHEMTHGVTQETANLNYENQPGALNESFSDVFGYFNDTEDWDIGEDITVSQPALRSLSNPTKYGQPDNFKNYKNLPNTDAGDYGGVHTNSGIPNKAAYNTITKIGVNKAEQIYYRALTVYLTPSSTFKDAKAALIQSARDLYGSQDAASVEAAWNAVGL

SEQ ID NO: 71185 - protein, 300 aa, Bacillus amyloliquefaciens
AATTGTGTTLKGKTVSLNISSESGKYVLRDLSKPTGTQIITYDLQNREYNLPGTLVSSTTNQFTMSSQRAAVDAHYNLGKVYDYFYQKFNRNSYDNKGGKIVSSVHYGSRYNNAAWIGDQMIYGDGDGSFFSPLSGSMDVTAHEMTHGVTQETANLNYENQPGALNESFSDVFGYFNDTEDWDIGEDITVSQPALRSLSNPTKYGQPDNFKNYKNLPNTDAGDYGGVHTNSGIPNKAAYNTITKIGVNKAEQIYYRALTVYLTPSSTFKDAKAALIQSARDLYGSQDAASVEAAWNAVGL

SEQ ID NO: 71186 - protein, 300 aa, Bacillus amyloliquefaciens
AATTGTGTTLKGKTVSLNISSESGKYVLRDLSKPTGTQIITYDLQNREYNLPGFLVSSTTNQFTTSSQRAAVDAHYNLGKVYDYFYQKFNRNSYDNKGGKIVSSVHYGSRYNNAAWIGDQMIYGDGDGSFFSPLSGSMDVTAHEMTHGVTQETANLNYENQPGALNESFSDVFGYFNDTEDWDIGEDITVSQPALRSLSNPTKYGQPDNFKNYKNLPNTDAGDYGGVHTNSGIPNKAAYNTITKIGVNKAEQIYYRALTVYLTPSSTFKDAKAALIQSARDLYGSQDAASVEAAWNAVGL

SEQ ID NO: 71187 - protein, 300 aa, Bacillus amyloliquefaciens
AATTGTGTTLKGKTVSLNISSESGKYVLRDLSKPTGTQIITYDLQNREYNLPGTLVSSTTNQFTTSSQRAAVDAHYNLGKVYDYFYQKFNRNSYDNKGGKIVSSVHYGSRYNNAAWIGDQMIYGDGDGSFFSPLSGSMDVTAHEMTHGVTQETANLNYENQPGALNESFSDVFGYFNDTEDWDIGEDITVFQPALRSLSNPTKYGQPDNFKNYKNLPNTDAGDYGGVHTNSGIPNKAAYNTITKIGVNKAEQIYYRALTVYLTPSSTFKDAKAALIQSARDLYGSQDAASVEAAWNAVGL

SEQ ID NO: 71188 - protein, 300 aa, Bacillus amyloliquefaciens
AATTGTGTTLKGKTVSLNISSESGKYVLRDLSKPTGTQIITYDLQNREYNLPGTLVSSTTNQFTTNSQRAAVDAHYNLGKVYDYFYQKFNRNSYDNKGGKIVSSVHYGSRYNNAAWIGDQMIYGDGDGSFFSPLSGSMDVTAHEMTHGVTQETANLNYENQPGALNESFSDVFGYFNDTEDWDIGEDITVSQPALRSLSNPTKYGQPDNFKNYKNLPNTDAGDYGGVHTNSGIPNKAAYNTITKIGVNKAEQIYYRALTVYLTPSSTFKDAKAALIQSARDLYGSQDAASVEAAWNAVGL

SEQ ID NO: 71189 - protein, 300 aa, Bacillus amyloliquefaciens
AATTGTGTTLKGKTVSLNISSESGKYVLRDLSKPTGTQIITYDLQNREYNLPGTLVSSTTNQFTTSSQRAAVDAHYNLGKVYDYFYQKFNRNSYDNKGGKIVSSVHYGSRYNNAAWIGIQMIYGDGDGSFFSPLSGSMDVTAHEMTHGVTQETANLNYENQPGALNESFSDVFGYFNDTEDWDIGEDITVSQPALRSLSNPTKYGQPDNFKNYKNLPNTDAGDYGGVHTNSGIPNKAAYNTITKIGVNKAEQIYYRALTVYLTPSSTFKDAKAALIQSARDLYGSQDAASVEAAWNAVGL

SEQ ID NO: 71190 - protein, 300 aa, Bacillus amyloliquefaciens
AATTGTGTTLKGKWVSLNISSESGKYVLRDLSKPTGTQIITYDLQNREYNLPGTLVSSTTNQFTTSSQRAAVDAHYNLGKVYDYFYQKFNRNSYDNKGGKIVSSVHYGSRYNNAAWIGDQMIYGDGDGSFFSPLSGSMDVTAHEMTHGVTQETANLNYENQPGALNESFSDVFGYFNDTEDWDIGEDITVSQPALRSLSNPTKYGQPDNFKNYKNLPNTDAGDYGGVHTNSGIPNKAAYNTITKIGVNKAEQIYYRALTVYLTPSSTFKDAKAALIQSARDLYGSQDAASVEAAWNAVGL

SEQ ID NO: 71191 - protein, 300 aa, Bacillus amyloliquefaciens
AATPGTGTTLKGKTVSLNISSESGKYVLRDLSKPTGTQIITYDLQNREYNLPGTLVSSTTNQFTTSSQRAAVDAHYNLGKVYDYFYQKFNRNSYDNKGGKIVSSVHYGSRYNNAAWIGDQMIYGDGDGSFFSPLSGSMDVTAHEMTHGVTQETANLNYENQPGALNESFSDVFGYFNDTEDWDIGEDITVSQPALRSLSNPTKYGQPDNFKNYKNLPNTDAGDYGGVHTNSGIPNKAAYNTITKIGVNKAEQIYYRALTVYLTPSSTFKDAKAALIQSARDLYGSQDAASVEAAWNAVGL

SEQ ID NO: 71192 - protein, 300 aa, Bacillus amyloliquefaciens
AATSGTGTTLKGKTVSLNISSESGKYVLRDLSKPTGTQIITYDLQNREYNLPGTLVSSTTNQFTTSSQRAAVDAHYNLGKVYDYFYQKFNRNSYDNKGGKIVSSVHYGSRYNNAAWIGDQMIYGDGDGSFFSPLSGSMDVTAHEMTHGVTQETANLNYENQPGALNESFSDVFGYFNDTEDWDIGEDITVSQPALRSLSNPTKYGQPDNFKNYKNLPNTDAGDYGGVHTNSGIPNKAAYNTITKIGVNKAEQIYYRALTVYLTPSSTFKDAKAALIQSARDLYGSQDAASVEAAWNAVGL

SEQ ID NO: 71193 - protein, 300 aa, Bacillus amyloliquefaciens
AATTGTGTTLKGKTVSLNISSESGKYVLRDLSKPTGTQIITYDLQNREYNLPGTLVSSTTNQFTTSSQRAAVDAHYNLGKVYDYFYQKFNRNSYDNKGGKIVSSVHYGSRYNNAAWIGDQMIYGDGDGSFFSPLSGSMDVTAHEMTHGVTQETANLNYENQPGALNESFSDVFGYFNDTEDWDIGEDITFSQPALRSLSNPTKYGQPDNFKNYKNLPNTEAGDYGGVHTNSGIPNKAAYNTITKIGVNKAEQIYYRALTVYLTPWSTFKDAKAALIQSARDLYGSQDAASVEAAWNAVGL

SEQ ID NO: 71194 - protein, 300 aa, Bacillus amyloliquefaciens
AATTGTGTTLKGKTVSLNISSESGKYVLRDLSKPTGTQIITYDLQNREYNLPGTLVSSTTNQFTPSSQRAAVDAHYNLGKVYDYFYQKFNRNSYDNKGGKIVSSVHYGSRYNNAAWIGDQMIYGDGDGSFFSPLSGSMDVTAHEMTHGVTQETANLNYENQPGALNESFSDVFGYFNDTEDWDIGEDITVSQPALRSLSNPTKYGQPDNFKNYKNLPNTDAGDYGGVHTNSGIPNKAAYNTITKIGVNKAEQIYYRALTVYLTPSSTFKDAKAALIQSARDLYGSQDAASVEAAWNAVGL

SEQ ID NO: 71195 - protein, 300 aa, Bacillus amyloliquefaciens
AATTGTGTTLKGKTVSLNISSESGKYVLRDLSKPTGTQIITYDLQNREYNLPGTLVSSTTNQFTTSSQRAAVDAHYNLGKVYDYFYQKFNRNSYDNKGGKIVSSVHYGSRYNNAAWIGDQMIYGDGDGSFFSPLSGSMDVTAHEMTHGVTQETANLNYENQPGALNESFSDVFGYFNDTEDWDIGEDITVSQPALRSLSNPTKYGQPDNFKNYKNLPNTAAGDRGGVHTNSGIPNKAAYNTITKIGVNKAEQIYYRALTVYLTPSSTFKDAKAALIQSARDLYGSQDAASVEAAWNAVGL

SEQ ID NO: 71196 - protein, 300 aa, Bacillus amyloliquefaciens
AATTGTGTTLKGKTVSLNISSESGKYVLRDLSKPTGTQIITYDLQNREYNLPGTLVSSTTNQFTTSSQRAAVDAHYNLGKVYDYFYQKFNRNSYDNKGGKIVSSVHYGSRYNNAAWIGDQMIYGDGDGSFFSPLSGSMDVTAHEMTHGVTQETANLNYENQPGALNESFSDVFGYFNDTEDWDIGEDITVSQPALRSLSNPTKYGQPDNFKNYKNLPNTDLGDYGGVHTNSGIPNKAAYNTITKIGVNKAEQIYYRALTVYLTPSSTFKDAKAALIQSARDLYGSQDAASVEAAWNAVGL

SEQ ID NO: 71197 - protein, 300 aa, Bacillus amyloliquefaciens
AATTGTGTTLKGKTVSLNISSESGKYVLRDLSKPTGTQIITYDLQNREYNLPGTLVSDTTNQFTTSSQRAAVDAHYNLGKVYDYFYQKFNRNSYDNKGGKIVSSVHYGSRYNNAAWIGDQMIYGDGDGSFFSPLSGSMDVTAHEMTHGVTQETANLNYENQPGALNESFSDVFGYFNDTEDWDIGEDITVSQPALRSLSNPTKYGQPDNFKNYKNLPNTDAGDYGGVHTNSGIPNKAAYNTITKIGVNKAEQIYYRALTVYLTPSSTFKDAKAALIQSARDLYGSQDAASVEAAWNAVGL

SEQ ID NO: 71198 - protein, 300 aa, Bacillus amyloliquefaciens
AATTGTGTTLKGKTVSLNISSESGKYVLRDLSKPTGTQIITYDLQNREYNLPGTLVSSTTNQFTTSSQRAAVDAHYNLGKVYDYFYQKFNRNSYDNKGGKIVSSVHYGSRYNNAAWIGDQMIYGDGDGSLFSPLSGSLDVTAHEMTHGVTQWTANLNYENQPGALNESFSDVFGYFNDPEDWDIGEDITVSQPALRSLSNPTKYGQPDNFKNYKNLPNTDAGDYGGVHTNSGIPNKAAYNTITKIGVNKAEQIYYRALTVYLTPSSTFKDAKAALIQSARDLYGSHDAASVEAAWNAVGL

SEQ ID NO: 71199 - protein, 300 aa, Bacillus amyloliquefaciens
AATTGTGTTLKGKTVSLNISSESGKYVLRDLSKPTGTQIITYDLQNREYNLPGTLVSSTTNQFTTSSQRAAVDAHYNLGKVYDYFYQKFNRNSYDNKGGKIVSSVHYGSRYNNAAWIGDQMIYGDGDGSFFSPLSGSMDVTAHEMTHGVTQETANLNYENQPGALNESFSDVFGYFNDTEDWDIGEDITLSQPALRSLSNPTKYGQPDNFKNYKNLPNTDAGDYGGVHTNSGIPNKAAYNTITKIGVNKAEQIYYRALTVYLTPWSTFKDAKAALIQSARDLYGSQDAASVEAAWNAVGL

SEQ ID NO: 71200 - protein, 300 aa, Bacillus amyloliquefaciens
AATTGTGTTLKGKTVSLNISSESGKYVLRDLSKPTGTQIITYDLQNREYNLPGTLVSSTTNQFTTSSQRAAVDAHYNLGKVYDYFYQKFNRNSYDNKGGKIVSSVHYGSRYNNAAWIGDQMIYGDGDGSFFSPLSGSMDVTAHEMTHGVTQETANLNYENQPGALNESFSDVFGYFNDTEDWDIGEDITVSQPALRSLSNPTKYGQPDNFKNYKNFPNTDAGDYGGVHTNSGIPNKAAYNTITKIGVNKAEQIYYRALTVYLTPSSTFKDAKAALIQSARDLYGSQDAASVEAAWNAVGL

SEQ ID NO: 71201 - protein, 300 aa, Bacillus amyloliquefaciens
AATTGTGTTLKGKTVSLNISSESGKYVLRDLSKPTGTQIITYDLQNREYNLPGTLVSSTTNQFTTSSQRAAVDAHYNLGKVYDYFYQKFNRNSYDNKGGKIVSSVHYGSRYNNAAWIGDQMIYGDGDGSFFSPLSGSMDVTAHEMTHGVTQETANLNYENQPGALNESFSDVFGYFNDTEDWDIGEDITVSQPALRSLSNPTKYGQPDNFKNYKNLPNTDAGDFGGVHTNSGIPNKAAYNTITKIGVNKAEQIYYRALTVYLTPSSTFKDAKAALIQSARDLYGSQDAASVEAAWNAVGL

SEQ ID NO: 71202 - protein, 300 aa, Bacillus amyloliquefaciens
AATTGTGTTLKGKTVSLNISSESGKYVLRDLSHPTGTQIITYDLQNREYNLPGTLVSSTTNQFTTSSQRAAVDAHYNLGKVYDYFYQKFNRNSYDNKGGKIVSSVHYGSRYNNAAWIGDQMIYGDGDGSFFSPLSGSMDVTAHEMTHGVTQETANLNYENQPGALNESFSDVFGYFNDTEDWDIGEDITVSQPALRSLSNPTKYGQPDNFKNYKNLPNTDAGDYGGVHTNSGIPNKAAYNTITKIGVNKAEQIYYRALTVYLTPSSTFKDAKAALIQSARDLYGSQDAASVEAAWNAVGL

SEQ ID NO: 71203 - protein, 300 aa, Bacillus amyloliquefaciens
AATTGTGTTLKGKTVSLNISSESGKYVLRDLSKPTGTQIITYDLQYREYNLPGTLVSSTTNQFTTSSQRAAVDAHYNLGKVYDYFYQKFNRNSYDNKGGKIVSSVHYGSRYNNAAWIGDQMIYGDGDGSFFSPLSGSMDVTAHEMTHGVTQETANLNYENQPGALNESFSDVFGYFNDTEDWDIGEDITVSQPALRSLSNPTKYGQPDNFKNYKNLPNTDAGDYGGVHTNSGIPNKAAYNTITKIGVNKAEQIYYRALTVYLTPSSTFKDAKAALIQSARDLYGSQDAASVEAAWNAVGL

SEQ ID NO: 71204 - protein, 300 aa, Bacillus amyloliquefaciens
AATTGTGTTLKGKTVSLNISSESGKYVLRDLSKPTGTQIITYDLQNREYNLPGTLVSSTTNQFTTSSQRAAVDAHYNLGKVYDYFYTKFNRNSYDNKGGKIVSSVHYGSRYNNAAWIGDQMIYGDGDGSFFSPLSGSMDVTAHEMTHGVTQETANLNYENQPGALNESFSDVFGYFNDTEDWDIGEDITVSQPALRSLSNPTKYGQPDNFKNYKNLPNTDAGDYGGVHTNSGIPNKAAYNTITKIGVNKAEQIYYRALTVYLTPSSTFKDAKAALIQSARDLYGSQDAASVEAAWNAVGL

SEQ ID NO: 71205 - protein, 300 aa, Bacillus amyloliquefaciens
AATTGTGTTLKGKTVSLNISSESGKYVLRDLSKPTGTQIITYDLQNREYNLPGWLVSSTTNQFTTSSQRAAVDAHYNLGKVYDYFYQKFNRNSYDNKGGKIVSSVHYGSRYNNAAWIGDQMIYGDGDGSFFSPLSGSMDVTAHEMTHGVTQETANLNYENQPGALNESFSDVFGYFNDTEDWDIGEDITVSQPALRSLSNPTKYGQPDNFKNYKNLPNTDAGDYGGVHTNSGIPNKAAYNTITKIGVNKAEQIYYRALTVYLTPSSTFKDAKAALIQSARDLYGSQDAASVEAAWNAVGL

SEQ ID NO: 71206 - protein, 300 aa, Bacillus amyloliquefaciens
AATTGTGTTLKGKTVSLNISSESIKYVLRDLSKPTGTQIITYDLQNREYNLPGTLVSSTTNQFTTSSQRAAVDAHYNLGKVYDYFYQKFNRNSYDNKGGKIVSSVHYGSRYNNAAWIGDQMIYGDGDGSFFSPLSGSMDVTAHEMTHGVTQETANLNYENQPGALNESFSDVFGYFNDTEDWDIGEDITVSQPALRSLSNPTKYGQPDNFKNYKNLPNTDAGDYGGVHTNSGIPNKAAYNTITKIGVNKAEQIYYRALTVYLTPSSTFKDAKAALIQSARDLYGSQDAASVEAAWNAVGL

SEQ ID NO: 71207 - protein, 300 aa, Bacillus amyloliquefaciens
AATTGTGTTLKGKSVSLNISSESGKYVLRDLSKPTGTQIITYDLQNREYNLPGTLVSSTTNQFTTSSQRAAVDAHYNLGKVYDYFYQKFNRNSYDNKGGKIVSSVHYGSRYNNAAWIGDQMIYGDGDGSFFSPLSGSMDVTAHEMTHGVTQETANLNYENQPGALNESFSDVFGYFNDTEDWDIGEDITVSQPALRSLSNPTKYGQPDNFKNYKNLPNTDAGDYGGVHTNSGIPNKAAYNTITKIGVNKAEQIYYRALTVYLTPSSTFKDAKAALIQSARDLYGSQDAASVEAAWNAVGL

SEQ ID NO: 71208 - protein, 300 aa, Bacillus amyloliquefaciens
AATTGTGTTLKGKTVSLNISSESGKYVLRDLSKPTGTQIITYDLQNREYNLPGTLVSSTTNQFTTSSQRAAVDAHYNLGKVYDYFYQKFNRNSYDNKGGKIVSSVHYGSRYNNAAWIGDQMIYGDGDGQFFSPLSGSMDVTAHEMTHGVTQETANLNYENQPGALNESFSDVFGYFNDTEDWDIGEDITVSQPALRSLSNPTKYGQPDNFKNYKNLPNTDAGDRGGVHTNSGIPNKAAYNTITKIGVNKAEQIYYRALTVYLTPSSTFKDAKAALIQSARDLYGSQDAASVEAAWNAVGL

SEQ ID NO: 71209 - protein, 300 aa, Bacillus amyloliquefaciens
AATTGTGTTLKGKTVSLNISSESGKYVLRDLSKPTGTQIITYDLQNREYNLPGTLVSSTTNQFTTSSQRAAVDAHYNLGKVYDYFYQKFNRNSYDNKGGKIVSSVHYGSRYNNAAWIGDQMIYGDGDGSFFSPLSGSMDVTAHEMTHGVTQETANLNYENQPGALNESFSDVFGYFNDTEDWDIGEDITVSQPALRSLSNPTKYRQPDNFKNYKNLPNTDAGDYGGVHTNSGIPNKAAYNTITKIGVNKAEQIYYRALTVYLTPSSTFKDAKAALIQSARDLYGSQDAASVEAAWNAVGL

SEQ ID NO: 71210 - protein, 300 aa, Bacillus amyloliquefaciens
AATTGTGTTLKGKTVSLNISSESGKYVLRDLSKPTGTQIITYDLQNREYNLPGTLVSSTVNQFTTSSQRAAVDAHYNLGKVYDYFYQKFNRNSYDNKGGKIVSSVHYGSRYNNAAWIGDQMIYGDGDGSFFSPLSGSMDVTAHEMTHGVTQETANLNYENQPGALNESFSDVFGYFNDTEDWDIGEDITVSQPALRSLSNPTKYGQPDNFKNYKNLPNTDAGDYGGVHTNSGIPNKAAYNTITKIGVNKAEQIYYRALTVYLTPSSTFKDAKAALIQSARDLYGSQDAASVEAAWNAVGL

SEQ ID NO: 71211 - protein, 300 aa, Bacillus amyloliquefaciens
AATTGTGTTLKGKTVSLNISSESGKYVLRDLSKPTGTQIITYDLQNREYNLPGTLVSSTTNQFTTSSQRAAVDAHYNLGKVYDYFYQKFNRNSYDNKGGKIVSSVHYGSRYNNAAWIGDQMIYGDGDGSFFSPLSGSMDVTAHEMTHGVTQETANLNYENQPGALNESFSDVFGYFNDTEDWDIGEDITVSQPALRSLRNPTKYGQPDNFKNYKNLPNTDAGDYGGVHTNSGIPNKAAYNTITKIGVNKAEQIYYRALTVYLTPSSTFKDAKAALIQSARDLYGSQDAASVEAAWNAVGL

SEQ ID NO: 71212 - protein, 300 aa, Bacillus amyloliquefaciens
AATTGTGTTLKGKTVSLNISSESGKYVLRDLSKPTGTQIITYDLQNREYNLPGTLVSSTINQFTTSSQRAAVDAHYNLGKVYDYFYQKFNRNSYDNKGGKIVSSVHYGSRYNNAAWIGDQMIYGDGDGSFFSPLSGSMDVTAHEMTHGVTQETANLNYENQPGALNESFSDVFGYFNDTEDWDIGEDITVSQPALRSLSNPTKYGQPDNFKNYKNLPNTDAGDYGGVHTNSGIPNKAAYNTITKIGVNKAEQIYYRALTVYLTPSSTFKDAKAALIQSARDLYGSQDAASVEAAWNAVGL

SEQ ID NO: 71213 - protein, 300 aa, Bacillus amyloliquefaciens
AATTGTGTTLKGKTVSLNISSESGKYVLRDLSKPTGTQIITYDLQNREYNLPGTLVSSTTNQFTTSSQRAAVDAHYNLGKVYDYFYQKFNRNSYDNKGGKIVSSVHYGSRYNNAAWIGDQMIYGDGDGSFFSPLSGSMDVTAHEMTHGVTQETANLNYENQPGALNESFSDVFGYFNDTEDWDIGEDITVSQPALRSLSNPTKYGQPDNFKNYKNLPNTDIGDYGGVHTNSGIPNKAAYNTITKIGVNKAEQIYYRALTVYLTPSSTFKDAKAALIQSARDLYGSQDAASVEAAWNAVGL

SEQ ID NO: 71214 - protein, 300 aa, Bacillus amyloliquefaciens
AATTGTGTTLKGKTVSLNISSESGKYVLRDLSKPTGTQIITYDLQNREYNLPGTLVSSTTNQFTTSSQRAAVDAHYNLGKVYDYFYQKFNRNSYDNKGGKIVSSVHYGSRYNNAAWIGDQMIYGDGDGSFFSPLSGSMDVTAHEMTHGVTQETANLNYENQPGALNESFSDVFGYFNDTEDWDIGEDITVGQPALRSLSNPTKYGQPDNFKNYKNLPNTDAGDYGGVHTNSGIPNKAAYNTITKIGVNKAEQIYYRALTVYLTPSSTFKDAKAALIQSARDLYGSQDAASVEAAWNAVGL

SEQ ID NO: 71215 - protein, 300 aa, Bacillus amyloliquefaciens
AATTGTGTTLKGKTVSLNISSESGKYVLRDLSKPTGTQIITYDLQNREYNLPGTLVSSTYNQFTTSSQRAAVDAHYNLGKVYDYFYQKFNRNSYDNKGGKIVSSVHYGSRYNNAAWIGDQMIYGDGDGSFFSPLSGSMDVTAHEMTHGVTQETANLNYENQPGALNESFSDVFGYFNDTEDWDIGEDITVSQPALRSLSNPTKYGQPDNFKNYKNLPNTDAGDYGGVHTNSGIPNKAAYNTITKIGVNKAEQIYYRALTVYLTPSSTFKDAKAALIQSARDLYGSQDAASVEAAWNAVGL

SEQ ID NO: 71216 - protein, 300 aa, Bacillus amyloliquefaciens
AATTGTGTTLKGKTVSLNISSESGKYVLRDLSKPTGTQIITYDLQNREYNLPGTLVSSTTNQFTTSSQRAAVDAHYNLGKVYDYFYQKFNRNSYDNKGGKIVSSVHYGSRYNNAAWIGDQMIYGDGDGSIFSPLSGSMDVTAHEMTHGVTQWTANLNYENQPGALNESFSDVFGYFNDTEDWDIGEDITVSQPALRSLSNPTKYGQPDNFKNYKNLPNTDAGDYGGVHTNSGIPNKAAYNTITKIGVNKAEQIYYRALTVYLTPSSTFKDAKAALIQSARDLYGSQDAASVEAAWNAVGL

SEQ ID NO: 71217 - protein, 300 aa, Bacillus amyloliquefaciens
AATTGTGTTLKGKTVSLNISSESGKYVLRDLSKPTGTQIITYDLQNREYNLPGTLVSSTTNQFTTSSQRAAVDAHYNLGKVYDYFYQKFNRNSYDNKGGKIVSSVHYGSRYNNAAWIGDQMIYGDGDGSFFSPLSGSMDVTAHEMTHGVTQETANLNYENQPGALNESFSDVFGYFNDTEDWDIGEDITLSQPALRSLSNPTKYGQPDNFKNYKNLPNTEAGDYGGVHTNSGIPNKAAYNTITKIGVNKAEQIYYRALTVYLTPWSTFKDAKAALIQSARDLYGSQDAASVEAAWNAVGL

SEQ ID NO: 71218 - protein, 300 aa, Bacillus amyloliquefaciens
AATTGTGTTLKGKTVSLNISSESGKYVLRDLSKPTGTQIITYDLQNREYNLPGTLVSSWTNQFTTSSQRAAVDAHYNLGKVYDYFYQKFNRNSYDNKGGKIVSSVHYGSRYNNAAWIGDQMIYGDGDGQFFSPLSGSMDVTAHEMTHGVTQETANLNYENQPGALNESFSDVFGYFNDTEDWDIGEDITVSQPALRSLSNPTKYGQPDNFKNYKNLPNTDAGDYGGVHTNSGIPNKAAYNTITKIGVNKAEQIYYRALTVYLTPSSTFKDAKAALIQSARDLYGSQDAASVEAAWNAVGL

SEQ ID NO: 71219 - protein, 300 aa, Bacillus amyloliquefaciens
AATTGTGTTLKGKTVSLNISSESGKYVLRDLSKPTGTQIITYDLQNREYNLPGTLVSSTTNQFTTSSQRAAVDAHYNLGKVYDYFYQKFNRNSYDNKGGKIVSSVHYGSRYNNAAWIGDQMIYGDGDGSFFSPLSGSMDVTAHEMTHGVTQSTANLNYENQPGALNESFSDVFGYFNDTEDWDIGEDITVSQPALRSLSNPTKYGQPDNFKNYKNLPNTDAGDYGGVHTNSGIPNKAAYNTITKIGVNKAEQIYYRALTVYLTPSSTFKDAKAALIQSARDLYGSQDAASVEAAWNAVGL

SEQ ID NO: 71220 - protein, 300 aa, Bacillus amyloliquefaciens
AATTGTGTTLKGKTVSLNISSESGKYVLRDLSKPTGTQIITYDLWNREYNLPGTLVSSTTNQFTTSSQRAAVDAHYNLGKVYDYFYQKFNRNSYDNKGGKIVSSVHYGSRYNNAAWIGDQMIYGDGDGSFFSPLSGSMDVTAHEMTHGVTQETANLNYENQPGALNESFSDVFGYFNDTEDWDIGEDITVSQPALRSLSNPTKYGQPDNFKNYKNLPNTDAGDYGGVHTNSGIPNKAAYNTITKIGVNKAEQIYYRALTVYLTPSSTFKDAKAALIQSARDLYGSQDAASVEAAWNAVGL

SEQ ID NO: 71221 - protein, 300 aa, Bacillus amyloliquefaciens
AATTGTGTTLKGKTVSLNISSERGKYVLRDLSKPTGTQIITYDLQNREYNLPGTLVSSTTNQFTTSSQRAAVDAHYNLGKVYDYFYQKFNRNSYDNKGGKIVSSVHYGSRYNNAAWIGDQMIYGDGDGSFFSPLSGSMDVTAHEMTHGVTQETANLNYENQPGALNESFSDVFGYFNDTEDWDIGEDITVSQPALRSLSNPTKYGQPDNFKNYKNLPNTDAGDYGGVHTNSGIPNKAAYNTITKIGVNKAEQIYYRALTVYLTPSSTFKDAKAALIQSARDLYGSQDAASVEAAWNAVGL

SEQ ID NO: 71222 - protein, 300 aa, Bacillus amyloliquefaciens
AATTGTGTTLKGKTVSLNISSESGKYVLRDLSKPTGTQIITYDLQNREYNLPGTLVSHTTNQFTTSSQRAAVDAHYNLGKVYDYFYQKFNRNSYDNKGGKIVSSVHYGSRYNNAAWIGDQMIYGDGDGSFFSPLSGSMDVTAHEMTHGVTQETANLNYENQPGALNESFSDVFGYFNDTEDWDIGEDITVSQPALRSLSNPTKYGQPDNFKNYKNLPNTDAGDYGGVHTNSGIPNKAAYNTITKIGVNKAEQIYYRALTVYLTPSSTFKDAKAALIQSARDLYGSQDAASVEAAWNAVGL

SEQ ID NO: 71223 - protein, 300 aa, Bacillus amyloliquefaciens
AATWGTGTTLKGKTVSLNISSESGKYVLRDLSKPTGTQIITYDLQNREYNLPGTLVSSTTNQFTTSSQRAAVDAHYNLGKVYDYFYQKFNRNSYDNKGGKIVSSVHYGSRYNNAAWIGDQMIYGDGDGSFFSPLSGSMDVTAHEMTHGVTQETANLNYENQPGALNESFSDVFGYFNDTEDWDIGEDITVSQPALRSLSNPTKYGQPDNFKNYKNLPNTDAGDYGGVHTNSGIPNKAAYNTITKIGVNKAEQIYYRALTVYLTPSSTFKDAKAALIQSARDLYGSQDAASVEAAWNAVGL

SEQ ID NO: 71224 - protein, 300 aa, Bacillus amyloliquefaciens
AATTGTGTTLKGKTVSLNISSESGKYVLRDLSKPTGTQIITYDLQNREYNLPGKLVSSTTNQFTTSSQRAAVDAHYNLGKVYDYFYQKFNRNSYDNKGGKIVSSVHYGSRYNNAAWIGDQMIYGDGDGSFFSPLSGSMDVTAHEMTHGVTQETANLNYENQPGALNESFSDVFGYFNDTEDWDIGEDITVSQPALRSLSNPTKYGQPDNFKNYKNLPNTDAGDYGGVHTNSGIPNKAAYNTITKIGVNKAEQIYYRALTVYLTPSSTFKDAKAALIQSARDLYGSQDAASVEAAWNAVGL

SEQ ID NO: 71225 - protein, 300 aa, Bacillus amyloliquefaciens
AATTGTGTTLKGKTVSLNISSESGKYVLRDLSKPTGTQIITYDLQNREYNLPGTLVSSTTNQFTTSSQRAAVDAHYNLGKVYDYFYQKFRRNSYDNKGGKIVSSVHYGSRYNNAAWIGDQMIYGDGDGSFFSPLSGSMDVTAHEMTHGVTQETANLNYENQPGALNESFSDVFGYFNDTEDWDIGEDITVSQPALRSLSNPTKYGQPDNFKNYKNLPNTDAGDYGGVHTNSGIPNKAAYNTITKIGVNKAEQIYYRALTVYLTPSSTFKDAKAALIQSARDLYGSQDAASVEAAWNAVGL

SEQ ID NO: 71226 - protein, 300 aa, Bacillus amyloliquefaciens
AATTGTGTTLKGKTVSLNISSESGKYVLRDLSKPTGTQIITYDLQNREYNLPGTLVSSTTNQFTTWSQRAAVDAHYNLGKVYDYFYQKFNRNSYDNKGGKIVSSVHYGSRYNNAAWIGDQMIYGDGDGSFFSPLSGSMDVTAHEMTHGVTQETANLNYENQPGALNESFSDVFGYFNDTEDWDIGEDITVSQPALRSLSNPTKYGQPDNFKNYKNLPNTDAGDYGGVHTNSGIPNKAAYNTITKIGVNKAEQIYYRALTVYLTPSSTFKDAKAALIQSARDLYGSQDAASVEAAWNAVGL

SEQ ID NO: 71227 - protein, 300 aa, Bacillus amyloliquefaciens
AATTGTGTTLKGKTVSLNISSESGKYVMRDLSKPTGTQIITYDLQNREYNLPGTLVSSTTNQFTTSSQRAAVDAHYNLGKVYDYFYQKFNRNSYDNKGGKIVSSVHYGSRYNNAAWIGDQMIYGDGDGSFFSPLSGSMDVTAHEMTHGVTQETANLNYENQPGALNESFSDVFGYFNDTEDWDIGEDITVSQPALRSLSNPTKYGQPDNFKNYKNLPNTDAGDYGGVHTNSGIPNKAAYNTITKIGVNKAEQIYYRALTVYLTPSSTFKDAKAALIQSARDLYGSQDAASVEAAWNAVGL

SEQ ID NO: 71228 - protein, 300 aa, Bacillus amyloliquefaciens
AATTGTGTTLKGKTVSLNISSESGKYVLRDLSKPTGTQIITYDLHNREYNLPGTLVSSTTNQFTTSSQRAAVDAHYNLGKVYDYFYQKFNRNSYDNKGGKIVSSVHYGSRYNNAAWIGDQMIYGDGDGSFFSPLSGSMDVTAHEMTHGVTQETANLNYENQPGALNESFSDVFGYFNDTEDWDIGEDITVSQPALRSLSNPTKYGQPDNFKNYKNLPNTDAGDYGGVHTNSGIPNKAAYNTITKIGVNKAEQIYYRALTVYLTPSSTFKDAKAALIQSARDLYGSQDAASVEAAWNAVGL

SEQ ID NO: 71229 - protein, 300 aa, Bacillus amyloliquefaciens
AATTGTGTTLKGKTVSLNISSESGKYVLRDLSKPTGTQIITYDLQNREYNLPGTLVSSTTNQFTTSSQRAAVDAHYNLGKVYDYFYQKFHRNSYDNKGGKIVSSVHYGSRYNNAAWIGDQMIYGDGDGSFFSPLSGSMDVTAHEMTHGVTQETANLNYENQPGALNESFSDVFGYFNDTEDWDIGEDITVSQPALRSLSNPTKYGQPDNFKNYKNLPNTDAGDYGGVHTNSGIPNKAAYNTITKIGVNKAEQIYYRALTVYLTPSSTFKDAKAALIQSARDLYGSQDAASVEAAWNAVGL

SEQ ID NO: 71230 - protein, 300 aa, Bacillus amyloliquefaciens
AATNGTGTTLKGKTVSLNISSESGKYVLRDLSKPTGTQIITYDLQNREYNLPGTLVSSTTNQFTTSSQRAAVDAHYNLGKVYDYFYQKFNRNSYDNKGGKIVSSVHYGSRYNNAAWIGDQMIYGDGDGSFFSPLSGSMDVTAHEMTHGVTQETANLNYENQPGALNESFSDVFGYFNDTEDWDIGEDITVSQPALRSLSNPTKYGQPDNFKNYKNLPNTDAGDYGGVHTNSGIPNKAAYNTITKIGVNKAEQIYYRALTVYLTPSSTFKDAKAALIQSARDLYGSQDAASVEAAWNAVGL

SEQ ID NO: 71231 - protein, 300 aa, Bacillus amyloliquefaciens
AATTGTGTTLKGKTVSLNISSESGKYVLRDLSKPTGTQIITYDLQNREYNLPGTLVSSTTNQFTTSSQRAAVDAHYNLGKVYDYFYQKFNRNSYDNKGGKIVSSVHYGSKYNNAAWIGDQMIYGDGDGSFFSPLSGSMDVTAHEMTHGVTQETANLNYENQPGALNESFSDVFGYFNDTEDWDIGEDITVSQPALRSLSNPTKYGQPDNFKNYKNLPNTDAGDYGGVHTNSGIPNKAAYNTITKIGVNKAEQIYYRALTVYLTPSSTFKDAKAALIQSARDLYGSQDAASVEAAWNAVGL

SEQ ID NO: 71232 - protein, 300 aa, Bacillus amyloliquefaciens
AATTGTGTTLKGKTVSLNISSESGKYVLRDLSKPTGTQIITYDLQNREYNLPGTLVSSTTNQFTTSSQRAAVDAHYNLGKVYDYFYQKFNRNSYDNKGGKIVSSVHYGSRYNNAAWIGDQMIYGDGDGSVFSPLSGSLDVTAHEMTHGVTQWTANLNYENQPGALNESFSDVFGYFNDPEDWDIGEDITVSQPALRSLSNPTKYGQPDNFKNYKNLPNTDAGDYGGVHTNSGIPNKAAYNTITKIGVNKAEQIYYRALTVYLTPSSTFKDAKAALIQSARDLYGSQDAASVEAAWNAVGL

SEQ ID NO: 71233 - protein, 300 aa, Bacillus amyloliquefaciens
AATTGTGTTLKGKTVSLNISSESGKYVLRDLSKPTGTQIITYDLQNREYNLPGTLVSSTTNQFTTSSQRAAVDAHYNLGKVYDYFYQKFNRNSYDNKGGKIVSSVHYGSRYNNAAWIGDQMIYGDGDGSVFSPLSGSMDVTAHEMTHGVTQETANLNYENQPGALNESFSDVFGYFNDTEDWDIGEDITVSQPALRSLSNPTKYGQPDNFKNYKNLPNTDAGDRGGVHTNSGIPNKAAYNTITKIGVNKAEQIYYRALTVYLTPSSTFKDAKAALIQSARDLYGSQDAASVEAAWNAVGL

SEQ ID NO: 71234 - protein, 300 aa, Bacillus amyloliquefaciens
AATTGTGTTLKGKGVSLNISSESGKYVLRDLSKPTGTQIITYDLQNREYNLPGTLVSSTTNQFTTSSQRAAVDAHYNLGKVYDYFYQKFNRNSYDNKGGKIVSSVHYGSRYNNAAWIGDQMIYGDGDGSFFSPLSGSMDVTAHEMTHGVTQETANLNYENQPGALNESFSDVFGYFNDTEDWDIGEDITVSQPALRSLSNPTKYGQPDNFKNYKNLPNTDAGDYGGVHTNSGIPNKAAYNTITKIGVNKAEQIYYRALTVYLTPSSTFKDAKAALIQSARDLYGSQDAASVEAAWNAVGL

SEQ ID NO: 71235 - protein, 300 aa, Bacillus amyloliquefaciens
AATTGTGTTLKGKTVSLNISSESGKYVLRDLSKPTGTQIITYDLQNREYNLPGTLVSSTTNQFTTSSQRAAVDAHYNLGKVYDYFYQKFNRNSYDNKGGKIVSSVHYGSRYNNAAWIGDQMIYGDGDGSFFSPLSGSMDVTAHEMTHGVTQETANLNYENQPGALNESFSDVFGYFNDTEDWDIGEDITVWQPALRSLSNPTKYGQPDNFKNYKNLPNTDAGDYGGVHTNSGIPNKAAYNTITKIGVNKAEQIYYRALTVYLTPSSTFKDAKAALIQSARDLYGSQDAASVEAAWNAVGL

SEQ ID NO: 71236 - protein, 300 aa, Bacillus amyloliquefaciens
AATTGTGTTLKGKTVSLNISSESGKYVLRDLSKPTGTQIITYDLQNREKNLPGTLVSSTTNQFTTSSQRAAVDAHYNLGKVYDYFYQKFNRNSYDNKGGKIVSSVHYGSRYNNAAWIGDQMIYGDGDGSFFSPLSGSMDVTAHEMTHGVTQETANLNYENQPGALNESFSDVFGYFNDTEDWDIGEDITVSQPALRSLSNPTKYGQPDNFKNYKNLPNTDAGDYGGVHTNSGIPNKAAYNTITKIGVNKAEQIYYRALTVYLTPSSTFKDAKAALIQSARDLYGSQDAASVEAAWNAVGL

SEQ ID NO: 71237 - protein, 300 aa, Bacillus amyloliquefaciens
AATTGTGTTLKGKTVSLNISSESGKYVLRDLSKPTGTQIITYDLQNREYPLPGTLVSSTTNQFTTSSQRAAVDAHYNLGKVYDYFYQKFNRNSYDNKGGKIVSSVHYGSRYNNAAWIGDQMIYGDGDGSFFSPLSGSMDVTAHEMTHGVTQETANLNYENQPGALNESFSDVFGYFNDTEDWDIGEDITVSQPALRSLSNPTKYGQPDNFKNYKNLPNTDAGDYGGVHTNSGIPNKAAYNTITKIGVNKAEQIYYRALTVYLTPSSTFKDAKAALIQSARDLYGSQDAASVEAAWNAVGL

SEQ ID NO: 71238 - protein, 300 aa, Bacillus amyloliquefaciens
AATTGTGTTLKGKTVSLNISSESGKYVLRDLSKPTGTQIITYDLQNREYNLPGTLVSSTTNQFTTSSQRAAVDAHYNLGKVYDYFYQKFNRNSYDKKGGKIVSSVHYGSRYNNAAWIGDQMIYGDGDGSFFSPLSGSMDVTAHEMTHGVTQETANLNYENQPGALNESFSDVFGYFNDTEDWDIGEDITVSQPALRSLSNPTKYGQPDNFKNYKNLPNTDAGDYGGVHTNSGIPNKAAYNTITKIGVNKAEQIYYRALTVYLTPSSTFKDAKAALIQSARDLYGSQDAASVEAAWNAVGL

SEQ ID NO: 71239 - protein, 300 aa, Bacillus amyloliquefaciens
AATTGTGTTLKGKTVSLNISSESGKYVLRDLSKPTGTQIITYDLQNREYNLPGTLVSSTTNQFTTSSQRAAVDAHYNLGKVYDYFYQKFNRNSYDNKGGKIVSSVHYGSRYNNAAWIGDQMIYGDGDGSFFSPLSGSMDVTAHEMTHGVTQETANLNYENQPGALNESFSDVFGYFNDWEDWDIGEDITVSQPALRSLSNPTKYGQPDNFKNYKNLPNTDAGDYGGVHTNSGIPNKAAYNTITKIGVNKAEQIYYRALTVYLTPSSTFKDAKAALIQSARDLYGSQDAASVEAAWNAVGL

SEQ ID NO: 71240 - protein, 300 aa, Bacillus amyloliquefaciens
AATTGTGTTLKGKTVSLNISSESGKYVLRDLSKPTGTQIITYDLQNREYNLPGTLVSSTTNQFTTSSQRAAVDAHYNLGKVYDYFYQKFNRNSYDNKGGKIVSSVHYGSRYNNAAWIGDQMIYGDGDGSTFSPLSGSMDVTAHEMTHGVTQETANLNYENQPGALNESFSDVFGYFNDTEDWDIGEDITVSQPALRSLSNPTKYGQPDNFKNYKNLPNTDAGDRGGVHTNSGIPNKAAYNTITKIGVNKAEQIYYRALTVYLTPSSTFKDAKAALIQSARDLYGSQDAASVEAAWNAVGL

SEQ ID NO: 71241 - protein, 300 aa, Bacillus amyloliquefaciens
AATTGTGTTLKGKTVSLNISSESGKYVLRDLSKPTGTQIITYDLQNREYNLPGTLVSSTTNQFTTSSQRAAVDAHYNLGKVYDYFYQKFNRNSYDNKGGKIVSSVHYGSRYNNAAWIGDQMIYGDGDGSFFSPLSGSMDVTAHEMTHGVTQETANLNYENQPGALNESFSDVFGYFNDTEDWDIGEDITVSQPALRSLSNPTKYGQPDNFKNYKNLPNTDYGDYGGVHTNSGIPNKAAYNTITKIGVNKAEQIYYRALTVYLTPSSTFKDAKAALIQSARDLYGSQDAASVEAAWNAVGL

SEQ ID NO: 71242 - protein, 300 aa, Bacillus amyloliquefaciens
AATTGTGTTLKGKTVSLNISSESGKYVLRDLSKPTGTQIITYDLQNREYNLPGTLVSSTTNQFTTSSQRAAVDAHYNLGKVYDYFYQKFNRNSYDNKGGKIVSSVHYGSRYNNAAWIGDQMIYGDGDGSFFSPLSGSMDVTAHEMTHGVTQETANLNYENQPGALNESFSDVFGYFNDTEDWDIGEDITVSQPALRSLSNPTKYGQPDNFKNYKNQPNTDAGDYGGVHTNSGIPNKAAYNTITKIGVNKAEQIYYRALTVYLTPSSTFKDAKAALIQSARDLYGSQDAASVEAAWNAVGL

SEQ ID NO: 71243 - protein, 300 aa, Bacillus amyloliquefaciens
AATTGTGTTLKGKTVSLNISSESGKYVLRDLSKPTGTQIITYDLQNREYNLPGTLVSSTTNQFTTSSQRAAVDAHYNLGKVYDYFYQKFNRNSYDNKGGKIVSSVHYGSRYNNAAWIGDQMIYGDGDGSFFSPLSGSMDVTAHEMTHGVTQETANLNYENQPGALNESFSDVFGYFNDTEDWDIGEDITVSQPALRSLSNPTKYGQPDNFKNYKNLPNTDAGDYGGVHTNSGIPNKAAYNTITKIGVNKAEQIYYRALTVYLTPSSTFKDAKAALIQSARDFYGSQDAASVEAAWNAVGL

SEQ ID NO: 71244 - protein, 300 aa, Bacillus amyloliquefaciens
AATIGTGTTLKGKTVSLNISSESGKYVLRDLSKPTGTQIITYDLQNREYNLPGTLVSSTTNQFTTSSQRAAVDAHYNLGKVYDYFYQKFNRNSYDNKGGKIVSSVHYGSRYNNAAWIGDQMIYGDGDGSFFSPLSGSMDVTAHEMTHGVTQETANLNYENQPGALNESFSDVFGYFNDTEDWDIGEDITVSQPALRSLSNPTKYGQPDNFKNYKNLPNTDAGDYGGVHTNSGIPNKAAYNTITKIGVNKAEQIYYRALTVYLTPSSTFKDAKAALIQSARDLYGSQDAASVEAAWNAVGL

SEQ ID NO: 71245 - protein, 300 aa, Bacillus amyloliquefaciens
AATTGTGTTLKGKTVSLNISSELGKYVLRDLSKPTGTQIITYDLQNREYNLPGTLVSSTTNQFTTSSQRAAVDAHYNLGKVYDYFYQKFNRNSYDNKGGKIVSSVHYGSRYNNAAWIGDQMIYGDGDGSFFSPLSGSMDVTAHEMTHGVTQETANLNYENQPGALNESFSDVFGYFNDTEDWDIGEDITVSQPALRSLSNPTKYGQPDNFKNYKNLPNTDAGDYGGVHTNSGIPNKAAYNTITKIGVNKAEQIYYRALTVYLTPSSTFKDAKAALIQSARDLYGSQDAASVEAAWNAVGL

SEQ ID NO: 71246 - protein, 300 aa, Bacillus amyloliquefaciens
AATTGTGTTLKGKTVSLNISSESRKYVLRDLSKPTGTQIITYDLQNREYNLPGTLVSSTTNQFTTSSQRAAVDAHYNLGKVYDYFYQKFNRNSYDNKGGKIVSSVHYGSRYNNAAWIGDQMIYGDGDGSFFSPLSGSMDVTAHEMTHGVTQETANLNYENQPGALNESFSDVFGYFNDTEDWDIGEDITVSQPALRSLSNPTKYGQPDNFKNYKNLPNTDAGDYGGVHTNSGIPNKAAYNTITKIGVNKAEQIYYRALTVYLTPSSTFKDAKAALIQSARDLYGSQDAASVEAAWNAVGL

SEQ ID NO: 71247 - protein, 300 aa, Bacillus amyloliquefaciens
AATTGTGTTLKGKTVSLNISSESGKYVLRDLSKPTGTQIITYDLQNREYNLPGTLVSSTWNQFTTSSQRAAVDAHYNLGKVYDYFYQKFNRNSYDNKGGKIVSSVHYGSRYNNAAWIGDQMIYGDGDGSFFSPLSGSMDVTAHEMTHGVTQETANLNYENQPGALNESFSDVFGYFNDTEDWDIGEDITVSQPALRSLSNPTKYGQPDNFKNYKNLPNTDAGDYGGVHTNSGIPNKAAYNTITKIGVNKAEQIYYRALTVYLTPSSTFKDAKAALIQSARDLYGSQDAASVEAAWNAVGL

SEQ ID NO: 71248 - protein, 300 aa, Bacillus amyloliquefaciens
AATTGTGTTLKGKTVSLNISSESGKYVLRDLSKPTGTQIITYDLQNREYNLPGTLVSSTTNQFTTSSQRAAVDAHYNLGKVYDYFYQKFNRNSYDNKGGKIVSSVHYGSRYNNAAWIGDQMIYGDGDGSFFSPLSGSMDVTAHEMTHGVTQETANLNYENQPGALNESFSDVFGYFNDTEDWDIGEDITFSQPALRSLSNPTKYGQPDNFKNYKNLPNTEAGDYGGVHTNSGIPNKAAYNTITKIGVNKAEQIYYRALTVYLTPNSTFKDAKAALIQSARDLYGSQDAASVEAAWNAVGL

SEQ ID NO: 71249 - protein, 300 aa, Bacillus amyloliquefaciens
AATTGTGTTLKGKTVSLNISSESGKYVLRDLSKPTGTQIITYDLQNREYHLPGTLVSSTTNQFTTSSQRAAVDAHYNLGKVYDYFYQKFNRNSYDNKGGKIVSSVHYGSRYNNAAWIGDQMIYGDGDGSFFSPLSGSMDVTAHEMTHGVTQETANLNYENQPGALNESFSDVFGYFNDTEDWDIGEDITVSQPALRSLSNPTKYGQPDNFKNYKNLPNTDAGDYGGVHTNSGIPNKAAYNTITKIGVNKAEQIYYRALTVYLTPSSTFKDAKAALIQSARDLYGSQDAASVEAAWNAVGL

SEQ ID NO: 71250 - protein, 300 aa, Bacillus amyloliquefaciens
AATTGTGTTLKGKTVSLNISSESGKYVLRDLSKPTGTQIITYDLQMREYNLPGTLVSSTTNQFTTSSQRAAVDAHYNLGKVYDYFYQKFNRNSYDNKGGKIVSSVHYGSRYNNAAWIGDQMIYGDGDGSFFSPLSGSMDVTAHEMTHGVTQETANLNYENQPGALNESFSDVFGYFNDTEDWDIGEDITVSQPALRSLSNPTKYGQPDNFKNYKNLPNTDAGDYGGVHTNSGIPNKAAYNTITKIGVNKAEQIYYRALTVYLTPSSTFKDAKAALIQSARDLYGSQDAASVEAAWNAVGL

SEQ ID NO: 71251 - protein, 300 aa, Bacillus amyloliquefaciens
AATTGTGTTLKGKTVSLNISSESGKYVLRDLSKPTGTQIITYDLQNREYNLPGTLVSSTTNQFTTSSQRAAVDAHYNLGKVYDYFYQKFNRNSYDNKGGKIVSSVHYGSRYNNAAWIGDQMIYGDGDGCFFSPLSGSMDVTAHEMTHGVTQETANLNYENQPGALNESFSDVFGYFNDTEDWDIGEDITVSQPALRSLSNPTKYGQPDNFKNYKNLPNTDAGDRGGVHTNSGIPNKAAYNTITKIGVNKAEQIYYRALTVYLTPSSTFKDAKAALIQSARDLYGSQDAASVEAAWNAVGL

SEQ ID NO: 71252 - protein, 300 aa, Bacillus amyloliquefaciens
AATTGTGTTLKGKTVSLNISSESGKYVLRDLSKPTGTQIITYDLQNREYNLPGTLVSSTTNQFTTSSQRAAVDAHYNLGKVYDYFYQKFNRNSYDNKGGKIVSSVHYGSRYNNAAWIGDQMIYGDGDGSFFSPLSGSMDVTAHEMTHGVTQETANLNYENQPGALNESFSDVFGYFNDTEDWDIGEDITVSQPALRSLSNPTKYSQPDNFKNYKNLPNTDAGDYGGVHTNSGIPNKAAYNTITKIGVNKAEQIYYRALTVYLTPSSTFKDAKAALIQSARDLYGSQDAASVEAAWNAVGL

SEQ ID NO: 71253 - protein, 300 aa, Bacillus amyloliquefaciens
AATTGTGTTLKGKTVSLNISSESGKYVLRDLSKPTGTQIITYDLRNREYNLPGTLVSSTTNQFTTSSQRAAVDAHYNLGKVYDYFYQKFNRNSYDNKGGKIVSSVHYGSRYNNAAWIGDQMIYGDGDGSFFSPLSGSMDVTAHEMTHGVTQETANLNYENQPGALNESFSDVFGYFNDTEDWDIGEDITVSQPALRSLSNPTKYGQPDNFKNYKNLPNTDAGDYGGVHTNSGIPNKAAYNTITKIGVNKAEQIYYRALTVYLTPSSTFKDAKAALIQSARDLYGSQDAASVEAAWNAVGL

SEQ ID NO: 71254 - protein, 300 aa, Bacillus amyloliquefaciens
AATTGTGTTLKGKTVSLNISSESGKYVLRDLSKPTGTQIITYDLQNREYNLPGTLVSSTTNQFTTSSQRAAVDAHYNLGKVYDYFYQKFNRNSYDNKGGKIVSSVHYGSRYNNAAWIGDQMIYGDGDLSFFSPLSGSMDVTAHEMTHGVTQETANLNYENQPGALNESFSDVFGYFNDTEDWDIGEDITVSQPALRSLSNPTKYGQPDNFKNYKNLPNTDAGDYGGVHTNSGIPNKAAYNTITKIGVNKAEQIYYRALTVYLTPSSTFKDAKAALIQSARDLYGSQDAASVEAAWNAVGL

SEQ ID NO: 71255 - protein, 300 aa, Bacillus amyloliquefaciens
AATTGTGTTLKGKTVSLNISSESGKYVLRDLSKPTGTQIITYDLQNREYNLPGTLVSSTQNQFTTSSQRAAVDAHYNLGKVYDYFYQKFNRNSYDNKGGKIVSSVHYGSRYNNAAWIGDQMIYGDGDGSFFSPLSGSMDVTAHEMTHGVTQETANLNYENQPGALNESFSDVFGYFNDTEDWDIGEDITVSQPALRSLSNPTKYGQPDNFKNYKNLPNTDAGDYGGVHTNSGIPNKAAYNTITKIGVNKAEQIYYRALTVYLTPSSTFKDAKAALIQSARDLYGSQDAASVEAAWNAVGL

SEQ ID NO: 71256 - protein, 300 aa, Bacillus amyloliquefaciens
AATTGTGTTLKGKIVSLNISSESGKYVLRDLSKPTGTQIITYDLQNREYNLPGTLVSSTTNQFTTSSQRAAVDAHYNLGKVYDYFYQKFNRNSYDNKGGKIVSSVHYGSRYNNAAWIGDQMIYGDGDGSFFSPLSGSMDVTAHEMTHGVTQETANLNYENQPGALNESFSDVFGYFNDTEDWDIGEDITVSQPALRSLSNPTKYGQPDNFKNYKNLPNTDAGDYGGVHTNSGIPNKAAYNTITKIGVNKAEQIYYRALTVYLTPSSTFKDAKAALIQSARDLYGSQDAASVEAAWNAVGL

SEQ ID NO: 71257 - protein, 300 aa, Bacillus amyloliquefaciens
AATTGTGTTLKGKTVSLNISSESGKYVLRDLSKPTGTQIITYDLQNREYNLPGTLVSSTTNQFTTSSQRAAVDAHYNLGKVYDYFYQKFNRNSYDNKGGKIVSSVHYGSRYNNAAWIGDQMIYGDGDGSFFSPLSGSMDVTAHEMTHGVTQETANLNYENQPGALNESFSDVFGYFNDLEDWDIGEDITVSQPALRSLSNPTKYGQPDNFKNYKNLPNTDAGDYGGVHTNSGIPNKAAYNTITKIGVNKAEQIYYRALTVYLTPSSTFKDAKAALIQSARDLYGSQDAASVEAAWNAVGL

SEQ ID NO: 71258 - protein, 300 aa, Bacillus amyloliquefaciens
AATTGTGTTLKGKTVSLNISSESGKYVLRDLSKPTGTQIITYDLQNREYNLPGTLVSSTTNQFTQSSQRAAVDAHYNLGKVYDYFYQKFNRNSYDNKGGKIVSSVHYGSRYNNAAWIGDQMIYGDGDGSFFSPLSGSMDVTAHEMTHGVTQETANLNYENQPGALNESFSDVFGYFNDTEDWDIGEDITVSQPALRSLSNPTKYGQPDNFKNYKNLPNTDAGDYGGVHTNSGIPNKAAYNTITKIGVNKAEQIYYRALTVYLTPSSTFKDAKAALIQSARDLYGSQDAASVEAAWNAVGL

SEQ ID NO: 71259 - protein, 300 aa, Bacillus amyloliquefaciens
AATTGTGTTLKGKTVSLNISSESGKYVLRDLSKPTGTQIITYDLFNREYNLPGTLVSSTTNQFTTSSQRAAVDAHYNLGKVYDYFYQKFNRNSYDNKGGKIVSSVHYGSRYNNAAWIGDQMIYGDGDGSFFSPLSGSMDVTAHEMTHGVTQETANLNYENQPGALNESFSDVFGYFNDTEDWDIGEDITVSQPALRSLSNPTKYGQPDNFKNYKNLPNTDAGDYGGVHTNSGIPNKAAYNTITKIGVNKAEQIYYRALTVYLTPSSTFKDAKAALIQSARDLYGSQDAASVEAAWNAVGL

SEQ ID NO: 71260 - protein, 300 aa, Bacillus amyloliquefaciens
AATTGTGTTLKGKTVSLNISSESGKYVLRDLSKPTGTQIITYDLQNREYNLPGTLVSSTTNQFTTSSQRAAVDAHYNLGKVYDYFYQKFNRNSYDNKGGKIVSSVHYGSRYNNAAWIGDQMIYGDGDGSFFSPLSGSMDVTAHEMTHGVTQETANLNYENQPGALNESFSDVFGYFNDTEDWDIGEDITFSQPALRSLSNPTKYGQPDNFKNYKNLPNTDAGDYGGVHTNSGIPNKAAYNTITKIGVNKAEQIYYRALTVYLTPNSTFKDAKAALIQSARDLYGSQDAASVEAAWNAVGL

SEQ ID NO: 71261 - protein, 300 aa, Bacillus amyloliquefaciens
AATTGTGTTLKGKTVSLNISSESGKYVLRDLSKPTGTQIITYDLQNRELNLPGTLVSSTTNQFTTSSQRAAVDAHYNLGKVYDYFYQKFNRNSYDNKGGKIVSSVHYGSRYNNAAWIGDQMIYGDGDGSFFSPLSGSMDVTAHEMTHGVTQETANLNYENQPGALNESFSDVFGYFNDTEDWDIGEDITVSQPALRSLSNPTKYGQPDNFKNYKNLPNTDAGDYGGVHTNSGIPNKAAYNTITKIGVNKAEQIYYRALTVYLTPSSTFKDAKAALIQSARDLYGSQDAASVEAAWNAVGL

SEQ ID NO: 71262 - protein, 300 aa, Bacillus amyloliquefaciens
AATTGTGTTLKGKTVSLNISSESGKYVLRDLSKPTGTQIITYDLQNREYNLPGGLVSSTTNQFTTSSQRAAVDAHYNLGKVYDYFYQKFNRNSYDNKGGKIVSSVHYGSRYNNAAWIGDQMIYGDGDGSFFSPLSGSMDVTAHEMTHGVTQETANLNYENQPGALNESFSDVFGYFNDTEDWDIGEDITVSQPALRSLSNPTKYGQPDNFKNYKNLPNTDAGDYGGVHTNSGIPNKAAYNTITKIGVNKAEQIYYRALTVYLTPSSTFKDAKAALIQSARDLYGSQDAASVEAAWNAVGL

SEQ ID NO: 71263 - protein, 300 aa, Bacillus amyloliquefaciens
AATTGTGTTLKGKTVSLNISSESGKYVLRDLSKPTGTQIITYDLQNREYNLPGTLVSSPTNQFTTSSQRAAVDAHYNLGKVYDYFYQKFNRNSYDNKGGKIVSSVHYGSRYNNAAWIGDQMIYGDGDGSFFSPLSGSMDVTAHEMTHGVTQETANLNYENQPGALNESFSDVFGYFNDTEDWDIGEDITVSQPALRSLSNPTKYGQPDNFKNYKNLPNTDAGDYGGVHTNSGIPNKAAYNTITKIGVNKAEQIYYRALTVYLTPSSTFKDAKAALIQSARDLYGSQDAASVEAAWNAVGL

SEQ ID NO: 71264 - protein, 300 aa, Bacillus amyloliquefaciens
AATTGTGTTLKGKTVSLNISSESGKYVLRDLSKPTGTQIITYDLQNREYNLPGTLVSSTTNQFTTSSQRAAVDAHYNLGKVYDYFYQKFNRNSYDNKGGKIVSSVHYGSRYNNAAWIGDQMIYGDGDGSFFSPLSGSMDVTAHEMTHGVTQETANLNYENQPGALNESFSDVFGYFNDTEDWDIGEDITVSQPALRSLENPTKYGQPDNFKNYKNLPNTDAGDYGGVHTNSGIPNKAAYNTITKIGVNKAEQIYYRALTVYLTPSSTFKDAKAALIQSARDLYGSQDAASVEAAWNAVGL

SEQ ID NO: 71265 - protein, 300 aa, Bacillus amyloliquefaciens
AATTGTGTTLKGKTVSLNISSESGKYVLRDLSKPTGTQIITYDLQNREYYLPGTLVSSTTNQFTTSSQRAAVDAHYNLGKVYDYFYQKFNRNSYDNKGGKIVSSVHYGSRYNNAAWIGDQMIYGDGDGSFFSPLSGSMDVTAHEMTHGVTQETANLNYENQPGALNESFSDVFGYFNDTEDWDIGEDITVSQPALRSLSNPTKYGQPDNFKNYKNLPNTDAGDYGGVHTNSGIPNKAAYNTITKIGVNKAEQIYYRALTVYLTPSSTFKDAKAALIQSARDLYGSQDAASVEAAWNAVGL

SEQ ID NO: 71266 - protein, 300 aa, Bacillus amyloliquefaciens
AATTGTGTTLKGKTVSLNISSESGKYVLRDLSKPTGTQIITYDLQNREYNLPGTLVSSTTNQFTTSSQRAAVDAHYNLGKVYDYFYQKFNRNSYDNKGGKIVSSVHYGSRYNNAAWIGDQMIYGDGDGSFFSPLSGSMDVTAHEMTHGVTQETANLNYENQPGALNESFSDVFGYFNDTEDWDIGEDITVSQPALRSLSNPTKYGQPDNFKNYKNLPNTDAGDNGGVHTNSGIPNKAAYNTITKIGVNKAEQIYYRALTVYLTPSSTFKDAKAALIQSARDLYGSQDAASVEAAWNAVGL

SEQ ID NO: 71267 - protein, 300 aa, Bacillus amyloliquefaciens
AATTGTGTTLKQKTVSLNISSESGKYVLRDLSKPTGTQIITYDLQNREYNLPGTLVSSTTNQFTTSSQRAAVDAHYNLGKVYDYFYQKFNRNSYDNKGGKIVSSVHYGSRYNNAAWIGDQMIYGDGDGSFFSPLSGSMDVTAHEMTHGVTQETANLNYENQPGALNESFSDVFGYFNDTEDWDIGEDITVSQPALRSLSNPTKYGQPDNFKNYKNLPNTDAGDYGGVHTNSGIPNKAAYNTITKIGVNKAEQIYYRALTVYLTPSSTFKDAKAALIQSARDLYGSQDAASVEAAWNAVGL

SEQ ID NO: 71268 - protein, 300 aa, Bacillus amyloliquefaciens
AATTGTGTTLKGKTVSLNISSESGKYVLRDLSKPTGTQIITYDLQNREYNLPGRLVSSTTNQFTTSSQRAAVDAHYNLGKVYDYFYQKFNRNSYDNKGGKIVSSVHYGSRYNNAAWIGDQMIYGDGDGSFFSPLSGSMDVTAHEMTHGVTQETANLNYENQPGALNESFSDVFGYFNDTEDWDIGEDITVSQPALRSLSNPTKYGQPDNFKNYKNLPNTDAGDYGGVHTNSGIPNKAAYNTITKIGVNKAEQIYYRALTVYLTPSSTFKDAKAALIQSARDLYGSQDAASVEAAWNAVGL

SEQ ID NO: 71269 - protein, 300 aa, Bacillus amyloliquefaciens
AATTGTGTTLKGKYVSLNISSESGKYVLRDLSKPTGTQIITYDLQNREYNLPGTLVSSTTNQFTTSSQRAAVDAHYNLGKVYDYFYQKFNRNSYDNKGGKIVSSVHYGSRYNNAAWIGDQMIYGDGDGSFFSPLSGSMDVTAHEMTHGVTQETANLNYENQPGALNESFSDVFGYFNDTEDWDIGEDITVSQPALRSLSNPTKYGQPDNFKNYKNLPNTDAGDYGGVHTNSGIPNKAAYNTITKIGVNKAEQIYYRALTVYLTPSSTFKDAKAALIQSARDLYGSQDAASVEAAWNAVGL

SEQ ID NO: 71270 - protein, 300 aa, Bacillus amyloliquefaciens
AATTGTGTTLKGKTVSLNISSESGKYVLRDLSKPTGTQIITYDLQNREYNLPGTLVSSTTNQFTTSSQRAAVDAHYNLGKVYDYFYQKFNRNSYDNKGGKIVSSVHYGSRYNNAAWIGDQMIYGDGDGSIFSPLSGSMDVTAHEMTHGVTQFTANLNYENQPGALNESFSDVFGYFNDTEDWDIGEDITVSQPALRSLSNPTKYGQPDNFKNYKNLPNTDAGDYGGVHTNSGIPNKAAYNTITKIGVNKAEQIYYRALTVYLTPSSTFKDAKAALIQSARDLYGSQDAASVEAAWNAVGL

SEQ ID NO: 71271 - protein, 300 aa, Bacillus amyloliquefaciens
AATTGTGTTLKGKTVSLNISSESGKYVLRDLSKPTGTQIITYDLQNREYNLPGTLVSQTTNQFTTSSQRAAVDAHYNLGKVYDYFYQKFNRNSYDNKGGKIVSSVHYGSRYNNAAWIGDQMIYGDGDGSFFSPLSGSMDVTAHEMTHGVTQETANLNYENQPGALNESFSDVFGYFNDTEDWDIGEDITVSQPALRSLSNPTKYGQPDNFKNYKNLPNTDAGDYGGVHTNSGIPNKAAYNTITKIGVNKAEQIYYRALTVYLTPSSTFKDAKAALIQSARDLYGSQDAASVEAAWNAVGL

SEQ ID NO: 71272 - protein, 300 aa, Bacillus amyloliquefaciens
AATTGTGTTLKGKTVSLNISSESGKYVLRDLSKPTGTQIITYDLQNREYNLPGTLVSSTRNQFTTSSQRAAVDAHYNLGKVYDYFYQKFNRNSYDNKGGKIVSSVHYGSRYNNAAWIGDQMIYGDGDGSFFSPLSGSMDVTAHEMTHGVTQETANLNYENQPGALNESFSDVFGYFNDTEDWDIGEDITVSQPALRSLSNPTKYGQPDNFKNYKNLPNTDAGDYGGVHTNSGIPNKAAYNTITKIGVNKAEQIYYRALTVYLTPSSTFKDAKAALIQSARDLYGSQDAASVEAAWNAVGL

SEQ ID NO: 71273 - protein, 300 aa, Bacillus amyloliquefaciens
AATTGTGTTLKGKTVSLNISSESGKYVLRDLSKPTGTQIITYDLQNREYNLPGTLVSSTTNQFTTVSQRAAVDAHYNLGKVYDYFYQKFNRNSYDNKGGKIVSSVHYGSRYNNAAWIGDQMIYGDGDGSFFSPLSGSMDVTAHEMTHGVTQETANLNYENQPGALNESFSDVFGYFNDTEDWDIGEDITVSQPALRSLSNPTKYGQPDNFKNYKNLPNTDAGDYGGVHTNSGIPNKAAYNTITKIGVNKAEQIYYRALTVYLTPSSTFKDAKAALIQSARDLYGSQDAASVEAAWNAVGL

SEQ ID NO: 71274 - protein, 300 aa, Bacillus amyloliquefaciens
AATTGTGTTLKGKTVSLNISSESGKYVLRDLSKPTGTQIITYDLQNREYNLPGTLVSSTTNQFTTSSQRAAVDAHYNLGKVYDYFYQKFNRNSYDNKGGKIVSSVHYGSRYNNAAWIGDQMIYGDGDGSFFSPLSGSMDVTAHEMTHGVTQETANLNYENQPGALNESFSDVFGYFNDTEDWDIGEDITVSQPALRSLSNPTKYGQPDNFKNYKNHPNTDAGDYGGVHTNSGIPNKAAYNTITKIGVNKAEQIYYRALTVYLTPSSTFKDAKAALIQSARDLYGSQDAASVEAAWNAVGL

SEQ ID NO: 71275 - protein, 300 aa, Bacillus amyloliquefaciens
AATTGTGTTLKGKTVSLNISSESGKYVLRDLSKPTGTQIITYDLQNREYNLPGILVSSTTNQFTTSSQRAAVDAHYNLGKVYDYFYQKFNRNSYDNKGGKIVSSVHYGSRYNNAAWIGDQMIYGDGDGSFFSPLSGSMDVTAHEMTHGVTQETANLNYENQPGALNESFSDVFGYFNDTEDWDIGEDITVSQPALRSLSNPTKYGQPDNFKNYKNLPNTDAGDYGGVHTNSGIPNKAAYNTITKIGVNKAEQIYYRALTVYLTPSSTFKDAKAALIQSARDLYGSQDAASVEAAWNAVGL

SEQ ID NO: 71276 - protein, 300 aa, Bacillus amyloliquefaciens
AATTGTGTTLKGKTVSLNISSESGKYVLRDLSKPTGTQIITYDLQNREYNLPGTLVSSTTNQFTTSSQRAAVDAHYNLGKVYDYFYQKFNRNSYDNKGGKIVSSVHYGSRYNNAAWIGDQMIYGDGDGSFFSPLSGSMDVTAHEMTHGVTQETANLNYENQPGALNESFSDVFGYFNDTEDWDIGEDITVSQPALRSLSNPTKYGQPDNFKNYKNLPNTDAGDYGGVHTNSGIPNKAAYNTITKIGVNKAEQIYYRALTVYLTPSSTFTDAKAALIQSARDLYGSQDAASVEAAWNAVGL

SEQ ID NO: 71277 - protein, 300 aa, Bacillus amyloliquefaciens
AATTGTGTTLKGKTVSLNISSESGKYVLRDLSKPTGTQIITYDLQNREYNLPGTLVSSTTNQFTTSSQRAAVDAHYNLGKVYDYFYQKFNRNSYDNKGGKIVSSVHYGSRYNNAAWIGDQMIYGDGDGSFFSPLSGSMDVTAHEMTHGVTQETANLNYENQPGALNESFSDVFGYFNDTEDWDIGEDITVSQPALRSLFNPTKYGQPDNFKNYKNLPNTDAGDYGGVHTNSGIPNKAAYNTITKIGVNKAEQIYYRALTVYLTPSSTFKDAKAALIQSARDLYGSQDAASVEAAWNAVGL

SEQ ID NO: 71278 - protein, 300 aa, Bacillus amyloliquefaciens
AATRGTGTTLKGKTVSLNISSESGKYVLRDLSKPTGTQIITYDLQNREYNLPGTLVSSTTNQFTTSSQRAAVDAHYNLGKVYDYFYQKFNRNSYDNKGGKIVSSVHYGSRYNNAAWIGDQMIYGDGDGSFFSPLSGSMDVTAHEMTHGVTQETANLNYENQPGALNESFSDVFGYFNDTEDWDIGEDITVSQPALRSLSNPTKYGQPDNFKNYKNLPNTDAGDYGGVHTNSGIPNKAAYNTITKIGVNKAEQIYYRALTVYLTPSSTFKDAKAALIQSARDLYGSQDAASVEAAWNAVGL

SEQ ID NO: 71279 - protein, 300 aa, Bacillus amyloliquefaciens
AATTGTGTTLKGKTVSLNISSESGKYVLRDLSKPTGTQIITYDLQNREYNLPGTLVSSTTNQFTTSSQRAAVDAHYNLGKVYDYFYQKFNRNSYDNKGGKIVSSVHYGSRYNNAAWIGDQMIYGDGDFSFFSPLSGSMDVTAHEMTHGVTQETANLNYENQPGALNESFSDVFGYFNDTEDWDIGEDITVSQPALRSLSNPTKYGQPDNFKNYKNLPNTDAGDYGGVHTNSGIPNKAAYNTITKIGVNKAEQIYYRALTVYLTPSSTFKDAKAALIQSARDLYGSQDAASVEAAWNAVGL

SEQ ID NO: 71280 - protein, 300 aa, Bacillus amyloliquefaciens
AATTGTGTTLKGKTVSLNISSEWGKYVLRDLSKPTGTQIITYDLQNREYNLPGTLVSSTTNQFTTSSQRAAVDAHYNLGKVYDYFYQKFNRNSYDNKGGKIVSSVHYGSRYNNAAWIGDQMIYGDGDGSFFSPLSGSMDVTAHEMTHGVTQETANLNYENQPGALNESFSDVFGYFNDTEDWDIGEDITVSQPALRSLSNPTKYGQPDNFKNYKNLPNTDAGDYGGVHTNSGIPNKAAYNTITKIGVNKAEQIYYRALTVYLTPSSTFKDAKAALIQSARDLYGSQDAASVEAAWNAVGL

SEQ ID NO: 71281 - protein, 300 aa, Bacillus amyloliquefaciens
AATTGTGTTLKGKTVSLNISSESGKYVLRDLSKPTGTQIITYDLQNREYNLPGTLVSSTTNQFTTSSQRAAVDAHYNLGKVYDYFYQKFNRNSYDNKGGKIVSSVHYGSRYNNAAWIGDQMIYGDGDGSFFSPLSGSMDVTAHEMTHGVTQETANLNYENQPGALNESFSDVFGYFNDTEDWDIGEDITVSQPALRSLSNPTKYGQPDNFKNYKNLPKTDAGDYGGVHTNSGIPNKAAYNTITKIGVNKAEQIYYRALTVYLTPSSTFKDAKAALIQSARDLYGSQDAASVEAAWNAVGL

SEQ ID NO: 71282 - protein, 300 aa, Bacillus amyloliquefaciens
AATTGTGTTLKGKTVSLNISSESGKYVLRDLSKPTGTQIITYDLQNREYNLPGTLVSSTTNQFTTSSQRAAVDAHYNLGKVYDYFYQKFNRNSYDNKGGKIVSSVHYGSRYNNAAWIGDQMIYGDGDGSFFSPLSGSMDVTAHEMTHGVTQETANLNYENQPGALNESFSDVFGYFNDTEDWDIGEDITVSQPALRSLSNPTKYGQPDNFKNYKNLPNTDAGDHGGVHTNSGIPNKAAYNTITKIGVNKAEQIYYRALTVYLTPSSTFKDAKAALIQSARDLYGSQDAASVEAAWNAVGL

SEQ ID NO: 71283 - protein, 300 aa, Bacillus amyloliquefaciens
AATTGTGTTLKGKTVSLNISSESGKYVLRDLSKPTGTQIITYDLQNREYNLPGTLVSSTTNQFTTSSQRAAVDAHYNLGKVYDYFYQKFNRNSYDNKGGKIVSSVHYGSRYNNAAWIGQQMIYGDGDGSFFSPLSGSMDVTAHEMTHGVTQETANLNYENQPGALNESFSDVFGYFNDTEDWDIGEDITVSQPALRSLSNPTKYGQPDNFKNYKNLPNTDAGDYGGVHTNSGIPNKAAYNTITKIGVNKAEQIYYRALTVYLTPSSTFKDAKAALIQSARDLYGSQDAASVEAAWNAVGL

SEQ ID NO: 71284 - protein, 300 aa, Bacillus amyloliquefaciens
AATTGTGTTLKGKTVSLNISSESGKYVLRDLSKPTGTQIITYDLQNREYKLPGTLVSSTTNQFTTSSQRAAVDAHYNLGKVYDYFYQKFNRNSYDNKGGKIVSSVHYGSRYNNAAWIGDQMIYGDGDGSFFSPLSGSMDVTAHEMTHGVTQETANLNYENQPGALNESFSDVFGYFNDTEDWDIGEDITVSQPALRSLSNPTKYGQPDNFKNYKNLPNTDAGDYGGVHTNSGIPNKAAYNTITKIGVNKAEQIYYRALTVYLTPSSTFKDAKAALIQSARDLYGSQDAASVEAAWNAVGL

SEQ ID NO: 71285 - protein, 300 aa, Bacillus amyloliquefaciens
AATTGTGTTLKGKTVSLNISSESGKYVLRDLSKPTGTQIITYDLQNREYNLPGTLVSSTTNQFTTSSQRAAVDAHYNLGKVYDYFYQKFNRNSYDNKGGKIVSSVHYGSRYNNAAWIGDQMIYGDGDGSFFSPLSGSMDVTAHEMTHGVTQETANLNYENQPGALNESFSDVFGYFNDTEDWDIGEDITVSQPALRSLSNPTKYGQPDNFKNYKNLPNTEAGDYGGVHTNSGIPNKAAYNTITKIGVNKAEQIYYRALTVYLTPQSTFKDAKAALIQSARDLYGSQDAASVEAAWNAVGL

SEQ ID NO: 71286 - protein, 300 aa, Bacillus amyloliquefaciens
AATTGTGTTLKGKTVSLNISSESGKYVLRDLSKPTGTQIITYDLQNREYQLPGTLVSSTTNQFTTSSQRAAVDAHYNLGKVYDYFYQKFNRNSYDNKGGKIVSSVHYGSRYNNAAWIGDQMIYGDGDGSFFSPLSGSMDVTAHEMTHGVTQETANLNYENQPGALNESFSDVFGYFNDTEDWDIGEDITVSQPALRSLSNPTKYGQPDNFKNYKNLPNTDAGDYGGVHTNSGIPNKAAYNTITKIGVNKAEQIYYRALTVYLTPSSTFKDAKAALIQSARDLYGSQDAASVEAAWNAVGL

SEQ ID NO: 71287 - protein, 300 aa, Bacillus amyloliquefaciens
AATTGTGTTLKGKTVSLNISSESGKYVLRDLSKPTGTQIITYDLQNREYNLPGSLVSSTTNQFTTSSQRAAVDAHYNLGKVYDYFYQKFNRNSYDNKGGKIVSSVHYGSRYNNAAWIGDQMIYGDGDGSFFSPLSGSMDVTAHEMTHGVTQETANLNYENQPGALNESFSDVFGYFNDTEDWDIGEDITVSQPALRSLSNPTKYGQPDNFKNYKNLPNTDAGDYGGVHTNSGIPNKAAYNTITKIGVNKAEQIYYRALTVYLTPSSTFKDAKAALIQSARDLYGSQDAASVEAAWNAVGL

SEQ ID NO: 71288 - protein, 300 aa, Bacillus amyloliquefaciens
AATTGTGTTLKGKTVSLNISSESGKYVLRDLSKPTGTQIITYDLQNREYNLPGTLVSSTTNKFTTQSQRAAVDAHYNLGKVYDYFYQKFNRNSYDNKGGKIVSSVHYGSRYNNAAWIGDQMIYGDGDGIFFSPLSGSMDVTAHEMTHGVTQETANLNYENQPGALNESFSDVFGYFNDTEDWDIGEDITVSQPALRSLSNPTKYGQPDNFKNYKNLPNTDAGDYGGVHTNSGIPNKAAYNTITKIGVNKAEQIYYRALTVYLTPSSTFKDAKAALIQSARDLYGSQDAASVEAAWNAVGL

SEQ ID NO: 71289 - protein, 300 aa, Bacillus amyloliquefaciens
AATTGTGTTLKGKTVSLNISSESGKYVLRDLSKPTGTQIITYDLQNREYNLPGTLVSSTTNQFTTSSQRAAVDAHYNLGKVYDYFYQKFNRNSYDNKGGKIVSSVHYGSRYNNAAWIGDQMIYGDGDGSFFSPLSGSMDVTAHEMTHGVTQMTANLNYENQPGALNESFSDVFGYFNDTEDWDIGEDITVSQPALRSLSNPTKYGQPDNFKNYKNLPNTDAGDYGGVHTNSGIPNKAAYNTITKIGVNKAEQIYYRALTVYLTPSSTFKDAKAALIQSARDLYGSQDAASVEAAWNAVGL

SEQ ID NO: 71290 - protein, 300 aa, Bacillus amyloliquefaciens
AATTGTGTTLKGKTVSLNISSESGKYVLRDLSKPTGTQIITYDLQNREYNLPGTLVSSTTCQFTTSSQRAAVDAHYNLGKVYDYFYQKFNRNSYDNKGGKIVSSVHYGSRYNNAAWIGDQMIYGDGDGSFFSPLSGSMDVTAHEMTHGVTQETANLNYENQPGALNESFSDVFGYFNDTEDWDIGEDITVSQPALRSLSNPTKYGQPDNFKNYKNLPNTDAGDYGGVHTNSGIPNKAAYNTITKIGVNKAEQIYYRALTVYLTPSSTFKDAKAALIQSARDLYGSQDAASVEAAWNAVGL

SEQ ID NO: 71291 - protein, 300 aa, Bacillus amyloliquefaciens
AATTGTGTTLKGKTVSLNISSESTKYVLRDLSKPTGTQIITYDLQNREYNLPGTLVSSTTNQFTTSSQRAAVDAHYNLGKVYDYFYQKFNRNSYDNKGGKIVSSVHYGSRYNNAAWIGDQMIYGDGDGSFFSPLSGSMDVTAHEMTHGVTQETANLNYENQPGALNESFSDVFGYFNDTEDWDIGEDITVSQPALRSLSNPTKYGQPDNFKNYKNLPNTDAGDYGGVHTNSGIPNKAAYNTITKIGVNKAEQIYYRALTVYLTPSSTFKDAKAALIQSARDLYGSQDAASVEAAWNAVGL

SEQ ID NO: 71292 - protein, 300 aa, Bacillus amyloliquefaciens
AATTGTGTTLKGKTVSLNISSESGKYVLRDLSKPTGTQIITYDLQNREYNLPGTLVSSTTNQFTTSSQRAAVDAHYNLGKVYDYFYQKFNRNSYDNKGGKIVSSVHYGSRYNNAAWIGDQMIYGDGDGSFFSPLPGSMDVTAHEMTHGVTQETANLNYENQPGALNESFSDVFGYFNDTEDWDIGEDITVSQPALRSLSNPTKYGQPDNFKNYKNLPNTDAGDYGGVHTNSGIPNKAAYNTITKIGVNKAEQIYYRALTVYLTPSSTFKDAKAALIQSARDLYGSQDAASVEAAWNAVGL

SEQ ID NO: 71293 - protein, 300 aa, Bacillus amyloliquefaciens
AATTGTGTTLKGKTVSLNISSESGKYVLRDLSKPTGTQIITYDLQNREYNLPGLLVSSTTNQFTTSSQRAAVDAHYNLGKVYDYFYQKFNRNSYDNKGGKIVSSVHYGSRYNNAAWIGDQMIYGDGDGSFFSPLSGSMDVTAHEMTHGVTQETANLNYENQPGALNESFSDVFGYFNDTEDWDIGEDITVSQPALRSLSNPTKYGQPDNFKNYKNLPNTDAGDYGGVHTNSGIPNKAAYNTITKIGVNKAEQIYYRALTVYLTPSSTFKDAKAALIQSARDLYGSQDAASVEAAWNAVGL

SEQ ID NO: 71294 - protein, 300 aa, Bacillus amyloliquefaciens
AATTGTGTTLKKKTVSLNISSESGKYVLRDLSKPTGTQIITYDLQNREYNLPGTLVSSTTNQFTTSSQRAAVDAHYNLGKVYDYFYQKFNRNSYDNKGGKIVSSVHYGSRYNNAAWIGDQMIYGDGDGSFFSPLSGSMDVTAHEMTHGVTQETANLNYENQPGALNESFSDVFGYFNDTEDWDIGEDITVSQPALRSLSNPTKYGQPDNFKNYKNLPNTDAGDYGGVHTNSGIPNKAAYNTITKIGVNKAEQIYYRALTVYLTPSSTFKDAKAALIQSARDLYGSQDAASVEAAWNAVGL

SEQ ID NO: 71295 - protein, 300 aa, Bacillus amyloliquefaciens
AATMGTGTTLKGKTVSLNISSESGKYVLRDLSKPTGTQIITYDLQNREYNLPGTLVSSTTNQFTTSSQRAAVDAHYNLGKVYDYFYQKFNRNSYDNKGGKIVSSVHYGSRYNNAAWIGDQMIYGDGDGSFFSPLSGSMDVTAHEMTHGVTQETANLNYENQPGALNESFSDVFGYFNDTEDWDIGEDITVSQPALRSLSNPTKYGQPDNFKNYKNLPNTDAGDYGGVHTNSGIPNKAAYNTITKIGVNKAEQIYYRALTVYLTPSSTFKDAKAALIQSARDLYGSQDAASVEAAWNAVGL

SEQ ID NO: 71296 - protein, 300 aa, Bacillus amyloliquefaciens
AATKGTGTTLKGKTVSLNISSESGKYVLRDLSKPTGTQIITYDLQNREYNLPGTLVSSTTNQFTTSSQRAAVDAHYNLGKVYDYFYQKFNRNSYDNKGGKIVSSVHYGSRYNNAAWIGDQMIYGDGDGSFFSPLSGSMDVTAHEMTHGVTQETANLNYENQPGALNESFSDVFGYFNDTEDWDIGEDITVSQPALRSLSNPTKYGQPDNFKNYKNLPNTDAGDYGGVHTNSGIPNKAAYNTITKIGVNKAEQIYYRALTVYLTPSSTFKDAKAALIQSARDLYGSQDAASVEAAWNAVGL

SEQ ID NO: 71297 - protein, 197 aa, Bacillus amyloliquefaciens
AATTGTGTTLKGKTVSLNISSESGKYVLRDLSKPTGTQIITYDLQNREYNLPGTLVSSTTNQFTTSSQRAAVDAHYNLGKVYDYFYQKFNRNSYDNKGGKIVSSVHYGSRYNNAAWIGDQMIYGDGDGSFFSPLSGSMDVTAHEMTHGVTQETANLNYENQPGALNESFSDVFGYFNDTEDWDIGEDITVSQPALRS

SEQ ID NO: 71298 - protein, 300 aa, Bacillus amyloliquefaciens
AATLGTGTTLKGKTVSLNISSENGKYVLRDLSKPTGTQIITYDLQNREYNLPGTLVSSTTNQFTTSSQRAAVDAHYNLGKVYDYFYQKFNRNSYDNKGGKIVSSVHYGSRYNNAAWIGDQMIYGDGDGSFFSPLSGSMDVTAHEMTHGVTQETANLNYENQPGALNESFSDVFGYFNDTEDWDIGEDITVSQPALRSLSNPTKYGQPDNFKNYKNLPNTDAGDYGGVHTNSGIPNKAAYNTITKIGVNKAEQIYYRALTVYLTPSSTFKDAKAALIQSARDLYGSQDAASVEAAWNAVGL

SEQ ID NO: 71299 - protein, 300 aa, Bacillus amyloliquefaciens
AATTGTGTTLKGKTVSLNISSESGKYVLRDLSKPTGTQIITYDLQNREYNLPGTLVSSTTNQFTTSSQRAAVDAHYNLGKVYDYFYQKFNRNSYDNKGGKIVSSVHYGSRYNNAAWIGDQMIYGDGDGSFFSPLSGSMDVTAHEMTHGVTQETANLNYENQPGALNESFSDVFGYFNVTEDWDIGEDITVSQPALRSLSNPTKYGQPDNFKNYKNLPNTDAGDRGGVHTNSGIPNKAAYNTITKIGVNKAEQIYYRALTVYLTPSSTFKDAKAALIQSARDLYGSQDAASVEAAWNAVGL

SEQ ID NO: 71300 - protein, 300 aa, Bacillus amyloliquefaciens
AATTGTGTTLKGKTVSLNISSESGKYVLRDLSKPTGTQIITYDLQNREYNLPGTLVSSTTNQFTTSSQRAAVDAHYNLGKVYDYFYQKFNRNSYDNKGGKIVSSVHYGSRYNNAAWIGDQMIYGDGDGSFFSPLSGSMDVTAHEMTHGVTQETANLNYENQPGALNESFSDVFGYFNDTEDWDIGEDITVSQPALRSLSNPTKYGQPDNFKNYKNLPNTDAGDRGGVHTNSGIPNKAAYNTITKIGVNKAEQIYYRALTVYLTPSSTFKDAKAALIQSARDLYGSQDALSVEAAWNAVGL

SEQ ID NO: 71301 - protein, 300 aa, Bacillus amyloliquefaciens
AATTGTGTTLKGKTVSLNISSESGKYVLRDLSKPTGTQIITYDLQNREYNLPGTLVSSTTNQFTTSSQRAAVDAHYNLGKVYDYFYQKFNRNSYDNKGGKIVSSVHYGSRYNNAAWIGDQMIYGDGDGSFFSPLSGSMDVTAHEMTHGVTQETANLNYENQPGALNESFSDVFGYFNDTEDWDIGEDITVSQPALRSLDNPTKYGQPDNFKNYKNLPNTDAGDRGGVHTNSGIPNKAAYNTITKIGVNKAEQIYYRALTVYLTPSSTFKDAKAALIQSARDLYGSQDAASVEAAWNAVGL

SEQ ID NO: 71302 - protein, 300 aa, Bacillus amyloliquefaciens
AATHGTGTTLKGKTVSLNISSESGKYVLRDLSKPTGTQIITYDLQNREYNLPGTLVSSTTNQFTTSSQRAAVDAHYNLGKVYDYFYQKFNRNSYDNKGGKIVSSVHYGSRYNNAAWIGDQMIYGDGDGSLFSPLSGSMDVTAHEMTHGVTQWTANLNYENQPGALNESFSDVFGYFNDPEDWDIGEDITVSQPALRSLSNPTKYGQPDNFKNYKNLPNTDAGDYGGVHTNSGIPNKAAYNTITKIGVNKAEQIYYRALTVYLTPSSTFKDAKAALIQSARDLYGSQDAASVEAAWNAVGL

SEQ ID NO: 71303 - protein, 300 aa, Bacillus amyloliquefaciens
AATTGTGTTLKGKTVSLNISSESGKYVLRDLSKPTGTQIITYDLQNREYNLPGTLVSSTTNQFTTSSQRAAVDAHYNLGKVYDYFYQKFNRNSYDNKGGKIVSSVHYGSRYNNAAWIGDQMIYGDGDGSFFSPLSGSMDVTAHEMTHGVTQETANLNYENQPGALNESFSDVFGYFNDTEDWDIGEDITVSQPALRSLSNPTKYGQPDNFKNYKNLPNTDAGDRGGVHTNSGIPNKAAYNTITKIGVNKAEQIYYRALTVYLTPSSTFYDAKAALIQSARDLYGSQDAASVEAAWNAVGL

SEQ ID NO: 71304 - protein, 300 aa, Bacillus amyloliquefaciens
AATTGTGTTLKGKTVSLNISSESGKYVLRDLSKPTGTQIITYDLQNREYNLPGTLVSSTTNQFTTSSQRAAVDAHYNLGKVYDYFYQKFNRNSYDNKGGKIVSSVHYGSRYNNAAWIGDQMIYGDGDGSFFSPLSGSMDVTAHEMTHGVTQETANLNYENQPGALNESFSDVFGYFNDTEDWDIGEDITVSQPALRSLSNPTKYGQPDNFKNYKNLPNTDAGDRGGVHTNSGIPNKAAYNTITKIGVNKAEQIYYRALTVYLTPSSTFKDAKAALIQSARDLYGSRDAASVEAAWNAVGL

SEQ ID NO: 71305 - protein, 300 aa, Bacillus amyloliquefaciens
AATTGTGTTLKGKTVSLNISSEAGKYVLRDLSKPTGTQIITYDLQNREYNLPGTLVSSTTNQFTTSSQRAAVDAHYNLGKVYDYFYQKFNRNSYDNKGGKIVSSVHYGSRYNNAAWIGDQMIYGDGDGSFFSPLSGSMDVTAHEMTHGVTQETANLNYENQPGALNESFSDVFGYFNDTEDWDIGEDITVSQPALRSLSNPTKYGQPDNFKNYKNLPNTDAGDRGGVHTNSGIPNKAAYNTITKIGVNKAEQIYYRALTVYLTPSSTFKDAKAALIQSARDLYGSQDAASVEAAWNAVGL

SEQ ID NO: 71306 - protein, 300 aa, Bacillus amyloliquefaciens
AATTGTGTTLKGKTVSLNISSESGKYVLRDLSKPTGTQIITYDLQNREYYLPGKLVSSTTNQFTTSSQRAAVDAHYNLGKVYDYFYQKFNRNSYDNKGGKIVSSVHYGSRYNNAAWIGDQMIYGDGDGSFFSPLSGSMDVTAHEMTHGVTQETANLNYENQPGALNESFSDVFGYFNDTEDWDIGEDITVSQPALRSLSNPTKYGQPDNFKNYKNLPNTDAGDYGGVHTNSGIPNKAAYNTITKIGVNKAEQIYYRALTVYLTPSSTFKDAKAALIQSARDLYGSQDAASVEAAWNAVGL

SEQ ID NO: 71307 - protein, 300 aa, Bacillus amyloliquefaciens
AATTGTGTTLKGKTVSLNISSESGKYVLRDLSKPTGTQIITYDLQNREYNLPGTLVSSTTNQFTTDSQRAAVDAHYNLGKVYDYFYQKFNRNSYDNKGGKIVSSVHYGSRYNNAAWIGDQMIYGDGDGSFFSPLSGSMDVTAHEMTHGVTQETANLNYENQPGALNESFSDVFGYFNDTEDWDIGEDITVSQPALRSLSNPTKYGQPDNFKNYKNLPNTDAGDRGGVHTNSGIPNKAAYNTITKIGVNKAEQIYYRALTVYLTPSSTFKDAKAALIQSARDLYGSQDAASVEAAWNAVGL

SEQ ID NO: 71308 - protein, 300 aa, Bacillus amyloliquefaciens
AATTGTGTTLKGKTVSLNISSESGKYVLRDLSKPTGTQIITYDLQNREYNLPGTLVSSTTNQFTTSSQRAAVDAHYNLGKVYDYFYQKFNRNSYDNKGGKIVSSVHYGSRYNNAAWIGDQMIYGDGDGSFFSPLSGSMDVTAHEMTHGVTQETANLNYENQPGALNESFSDVFGYFNDTEDWDIGMDITVSQPALRSLSNPTKYGQPDNFKNYKNLPNTDAGDRGGVHTNSGIPNKAAYNTITKIGVNKAEQIYYRALTVYLTPSSTFKDAKAALIQSARDLYGSQDAASVEAAWNAVGL

SEQ ID NO: 71309 - protein, 300 aa, Bacillus amyloliquefaciens
AATTGTGTTLKGKTVSLNISSESGKYVLRDLSKPTGTQIITYDLQNREYNLPGTLVSSTTNQFTTSSQRAAVDAHYNLGKVYDYFYQKFNRNSYDNKGGKIVSSVHYGSRYNNAAWIGDQMIYGDGDGSFFSPLSGSMDVTAHEMTHGVTQETANLNYENQPGALNESFSDVFGYFNDTEDWDIGEDITVSQPALRSLSNPTKYGQPDNFKNYKNLPNTDAGDRGGVHTNSGIPNKAAYNTITKIGVNKAEQIYYRALTVYLTPSSTFKDAKAALIQSAYDLYGSQDAASVEAAWNAVGL

SEQ ID NO: 71310 - protein, 300 aa, Bacillus amyloliquefaciens
AATTGTGTTLKGKTVSLNISSESGKYVLRDLSKPTGTQIITYDLQNREYNLPGTLVSSTTNQFTTSSQRAAVDAHYNLGKVYDYFYQKFNRNSYDNKGGKIVSSVHYGSRYNNAAWIGDQMIYGDGDGSFFSPLSGSMDVTAHEMTHGVTQETANLNYENQPGALNESFSDVFGYFNSTEDWDIGEDITVSQPALRSLSNPTKYGQPDNFKNYKNLPNTDAGDRGGVHTNSGIPNKAAYNTITKIGVNKAEQIYYRALTVYLTPSSTFKDAKAALIQSARDLYGSQDAASVEAAWNAVGL

SEQ ID NO: 71311 - protein, 300 aa, Bacillus amyloliquefaciens
AATTGTGTTLKGKTVSLNISSESGKYVLRDLSKPTGTQIITYDLQNREYNLPGTLVSSTTNQFTTSSQRAAVDAHYNLGKVYDYFYQKFNRNSYDNKGGKIVSSVHYGSNYNNAAWIGDQMIYGDGDGSFFSPLSGSMDVTAHEMTHGVTQETANLNYENQPGALNESFSDVFGYFNDTEDWDIGEDITVSQPALRSLSNPTKYGQPDNFKNYKNLPNTDAGDRGGVHTNSGIPNKAAYNTITKIGVNKAEQIYYRALTVYLTPSSTFKDAKAALIQSARDLYGSQDAASVEAAWNAVGL

SEQ ID NO: 71312 - protein, 300 aa, Bacillus amyloliquefaciens
AATTGTGTTLKGKTVSLNISSESGKYVLRDLSKPTGTQIITYDLQNREYNLPGTLVSSTTNQFTTSSQRAAVDAHYNLGKVYDYFYQKFNRNSYDNKGGKIVSSVHYGSRYNNAAWIGDQMIYGDGDGSFFSPLSGSMDVTAHEMTHGVTQETANLNYENQPGALNESFSDVFGYFNDTEDWDIGKDITVSQPALRSLSNPTKYGQPDNFKNYKNLPNTDAGDRGGVHTNSGIPNKAAYNTITKIGVNKAEQIYYRALTVYLTPSSTFKDAKAALIQSARDLYGSQDAASVEAAWNAVGL

SEQ ID NO: 71313 - protein, 300 aa, Bacillus amyloliquefaciens
AATTGTGTTLKGKTVSLNISSESGKYVLRDLSKPTGTQIITYDLQNREYNLPGTLVSSTTNQFTTSSQRAAVDAHYNLGKVYDYFYQKFNRNSYDNKGGKIVSSVHYGSRYNNAAWIGDQMIYGDGDGSFFSPLSGSMDVTAHEMTHGVTQETANLNYENQPGALNESFSDVFGYFNDTEDWDIGEDITVSQPALRSLSNPTKYGQPDNFKNYKNLPNTDAGDRGGVHTNSGIPNKAAYNTIYKIGVNKAEQIYYRALTVYLTPSSTFKDAKAALIQSARDLYGSQDAASVEAAWNAVGL

SEQ ID NO: 71314 - protein, 300 aa, Bacillus amyloliquefaciens
AATTGTGTTLKGKTVSLNISSESGKYVLRDLSKPTGTQIITYDLQNREYNLPGTLVSSTTNQFTTSSQRAAVDAHYNLGKVYDYFYQKFNRNSYDNKGGKIVSSVHYGSRYNNAAWIGDQMIYGDGDGSFFSPLSGSMHVTAHEMTHGVTQETANLNYENQPGALNESFSDVFGYFNDTEDWDIGEDITVSQPALRSLSNPTKYGQPDNFKNYKNLPNTDAGDRGGVHTNSGIPNKAAYNTITKIGVNKAEQIYYRALTVYLTPSSTFKDAKAALIQSARDLYGSQDAASVEAAWNAVGL

SEQ ID NO: 71315 - protein, 300 aa, Bacillus amyloliquefaciens
AATTGTGTTLKGKTVSLNISSESGKYVLRDLSKPTGTQIITYDLQNREYNLPGTLVSSTTNQFTTSSQRAAVDAHYNLGKVYDYFYQKFNRNSYDNKGGKIVSSVHYGSRYNNAAWIGDQMIYGDGDGSFFSPLSGSMDVTAHEMTHGVTQETANLNYENQPGALNESFSDVFGYFNDTEDWDIGEDITVSQPALRSLSNPTKYGQPDNFKNYNNLPNTDAGDRGGVHTNSGIPNKAAYNTITKIGVNKAEQIYYRALTVYLTPSSTFKDAKAALIQSARDLYGSQDAASVEAAWNAVGL

SEQ ID NO: 71316 - protein, 300 aa, Bacillus amyloliquefaciens
AATTGTGTTLKGKTVSLNISSESGKYVLRDLSKPTGTQIITYDLQNREYNLPGTLVSSTTNQFTTSSQRAAVDAHYNLGKVYDYFYQKFNRNSYDNKGGKIVSSVHYGSRYNNAAWIGDQMIYGDGDGSFFSPLSGSMDVTAHEMTHGVTQETANLNYENQPGALNESFSDVFGYFNDTEDWDIGEDITVSQPALRSLSNPTKYGQPDNFKNYKNLPNTDAGDRGGVHTNSGIPNKAAYNTITKIGVNKAEQIYYRALTVYLTPRSTFKDAKAALIQSARDLYGSQDAASVEAAWNAVGL

SEQ ID NO: 71317 - protein, 300 aa, Bacillus amyloliquefaciens
AATTGTGTTLKGKTVSLNISSESGKYVLRDLSKPTGTQIITYDLQNREYWLPGTLVSSTTNQFTTSSQRAAVDAHYNLGKVYDYFYQKFNRNSYDNKGGKIVSSVHYGSRYNNAAWIGDQMIYGDGDGSFFSPLSGSMDVTAHEMTHGVTQETANLNYENQPGALNESFSDVFGYFNDTEDWDIGEDITVSQPALRSLSNPTKYGQPDNFKNYKNLPNTDAGDYGGVHTNSGIPNKAAYNTITKIGVNKAEQIYYRALTVYLTPSSTFKDAKAALIQSARDLYGSQDDASVEAAWNAVGL

SEQ ID NO: 71318 - protein, 300 aa, Bacillus amyloliquefaciens
AATTGTGTTLKGKTVSLNISSESGKYVLRDLSKPTGTQIITYDLQNREYNLPGTLDSSTDNQFTTSSQRAAVDAHYNLGKVYDYFYQKFNRNSYDNKGGKIVSSVHYGSRYNNAAWIGDQMIYGDGDGSFFSPLSGSMDVTAHEMTHGVTQETANLNYENQPGALNESFSDVFGYFNDTEDWDIGEDITVSQPALRSLSNPTKYGQPDNFKNYKNLPNTDAGDYGGVHTNSGIPNKAAYNTITKIGVNKAEQIYYRALTVYLTPSSTFKDAKAALIQSARDLYGSQDAASVEAAWNAVGL

SEQ ID NO: 71319 - protein, 300 aa, Bacillus amyloliquefaciens
AATTGTGTTLKGKTVSLNISSESGKYVLRDLSKPTGTQIITYDLQNREYNLPGTLVSSTTNQFTTSSQRAAVDAHYNLGKVYDYFYQKFNRNSYDNKGGKIVSSVHYGSRYNNAAWIGDQMIYGDGDGSFFSPLSGSMDVTAHEMTHGVTQETANLNYENQPGALNESFSDVFGYFNDTEDWDIGEDITVSQPALRSLSNPTKYGQPDNFKNYKNLPNTDAGDRGGVHTNSGIPNKAAYNTITKIGVNKAEQIYYRALTVYLTPSSTFKDAKAALIQSARDLYGAQDAASVEAAWNAVGL

SEQ ID NO: 71320 - protein, 300 aa, Bacillus amyloliquefaciens
AATTGTGTTLKGKTVSLNISSESGKYVLRDLSKPTGTQIITYDLQNREYNLPGTLVSSTTNQFTTSSQRAAVDAHYNLGKVYDYFYQKFNRNSYDNKGGKIVSSVHYGSRYNNAAWIGDQMIYGDGDGSFFSPLSGSMLVTAHEMTHGVTQETANLNYENQPGALNESFSDVFGYFNDTEDWDIGEDITVSQPALRSLSNPTKYGQPDNFKNYKNLPNTDAGDRGGVHTNSGIPNKAAYNTITKIGVNKAEQIYYRALTVYLTPSSTFKDAKAALIQSARDLYGSQDAASVEAAWNAVGL

SEQ ID NO: 71321 - protein, 300 aa, Bacillus amyloliquefaciens
AATTGTGTTLKGKTVSLNISSESGKYVLRDLSKPTGTQIITYDLQNREYNLPGTLVSSTTNQFTTSSQRAAVDAHYNLGKVYDYFYQKFNRNSYDNKGGKIVSSVHYGSRYNNAAWIGDQMIYGDGDGSFFSPLSGSMEVTAHEMTHGVTQETANLNYENQPGALNESFSDVFGYFNDTEDWDIGEDITVSQPALRSLSNPTKYGQPDNFKNYKNLPNTDAGDRGGVHTNSGIPNKAAYNTITKIGVNKAEQIYYRALTVYLTPSSTFKDAKAALIQSARDLYGSQDAASVEAAWNAVGL

SEQ ID NO: 71322 - protein, 300 aa, Bacillus amyloliquefaciens
AATTGTGTTLKGKTVSLNISSENYKYVLRDLSKPTGTQIITYDLQNREYNLPGTLVSSTTNQFTTSSQRAAVDAHYNLGKVYDYFYQKFNRNSYDNKGGKIVSSVHYGSRYNNAAWIGDQMIYGDGDGSFFSPLSGSMDVTAHEMTHGVTQETANLNYENQPGALNESFSDVFGYFNDTEDWDIGEDITVSQPALRSLSNPTKYGQPDNFKNYKNLPNTDAGDYGGVHTNSGIPNKAAYNTITKIGVNKAEQIYYRALTVYLTPSSTFKDAKAALIQSARDLYGSQDAASVEAAWNAVGL

SEQ ID NO: 71323 - protein, 300 aa, Bacillus amyloliquefaciens
AATTGTGTTLKGKTVSLNISSESGKYVLRDLSKPTGTQIITYDLQNREYNLPGTLVSSTTNQFTTSSQRAAVDAHYNLGKVYDYFYQKFNRNSYDNKGGKIVSSVHYGSRYNNAAWIGDQMIYGDGDGSFFSPLSGSMDVTAHEMTHGVTQETANLNYENQPGALNESFSDVFGYFNDTEDWDIGEDITVSQPALRSLSNPTKYGQPDNFKNYKNLPNTDAGDRGGVHTNSGIPNKAAYNTITKIGVNKAEQIYYRALTVYLTPSSTFKDAKAALIQSARDVYGSQDAASVEAAWNAVGL

SEQ ID NO: 71324 - protein, 300 aa, Bacillus amyloliquefaciens
AATTGTGTTLKGKTVSLNISSESGKYVLRDLSKPTGTQIITYDLQNREYNLPGTLVSSRTNQFTTNSQRAAVDAHYNLGKVYDYFYQKFNRNSYDNKGGKIVSSVHYGSRYNNAAWIGDQMIYGDGDGQFFSPLSGSMDVTAHEMTHGVTQETANLNYENQPGALNESFSDVFGYFNDTEDWDIGEDITVSQPALRSLSNPTKYGQPDNFKNYKNLPNTDAGDYGGVHTNSGIPNKAAYNTITKIGVNKAEQIYYRALTVYLTPSSTFKDAKAALIQSARDLYGSQDAASVEAAWNAVGL

SEQ ID NO: 71325 - protein, 300 aa, Bacillus amyloliquefaciens
AATTGTGTTLKGKTVSLNISSESGKYVLRDLSKPTGTQIITYDLQNREYNLPGTLVSSTTNQFTTSSQRAAVDAHYNLGKVYDYFYQKFNRNSYDNKGGKIVSSVHYGSRYNNAAWIGDQMIYGDGDGSFFSPLSGSMDVTAHEMTHGVTQETANLNYENQPGALNESFSDVFGYFNDTEDWDIGEDITVSQPALRSLSNPTKYGQPDNFKNYKNLPNTDAGDRGGVHTNSGIPNKAAYNTITKIGVNKAEQIYYRALTVYLTPSSTFKDAKAALIQSARDRYGSQDAASVEAAWNAVGL

SEQ ID NO: 71326 - protein, 300 aa, Bacillus amyloliquefaciens
AATTGTGTTLKGKTVSLNISSESGKYVLRDLSKPTGTQIITYDLQNREYNLPGTLVSSTTNQFTTSSQRAAVDAHYNLGKVYDYFYQKFNRNSYDNKGGKIVSSVHYGSRYNNAAWIGDQMIYGDGDGSFFSPLSGSMDVTAHEMTHGVTQETANLNYENQPGALNESFSDVFGYFNDTEDWDIGEDITVSQPALRSLSNPTKYGQPDNFKNYENLPNTDAGDRGGVHTNSGIPNKAAYNTITKIGVNKAEQIYYRALTVYLTPSSTFKDAKAALIQSARDLYGSQDAASVEAAWNAVGL

SEQ ID NO: 71327 - protein, 300 aa, Bacillus amyloliquefaciens
AATTGTGTTLKGKTVSLNISSESGKYVLRDLSKPTGTQIITYDLQNREYNLPGTLVSSTTNQFTTSSQRAAVDAHYNLGKVYDYFYEKFNRNSYDNKGGKIVSSVHYGSRYNNAAWIGDQMIYGDGDGSFFSPLSGSMDVTAHEMTHGVTQETANLNYENQPGALNESFSDVFGYFNDTEDWDIGEDITVSQPALRSLSNPTKYGQPDNFKNYKNLPNTDAGDRGGVHTNSGIPNKAAYNTITKIGVNKAEQIYYRALTVYLTPSSTFKDAKAALIQSARDLYGSQDAASVEAAWNAVGL

SEQ ID NO: 71328 - protein, 300 aa, Bacillus amyloliquefaciens
AATTGTGTTLKGKTVSLNISSESGKYVLRDLSKPTGTQIITYDLQNREYNLPGTLVSSTTNQFTTSSQRAAVDAHYNLGKVYDYFYQKFNRNSYDNKGGKIVSSVHYGSLYNNAAWIGDQMIYGDGDGSFFSPLSGSMDVTAHEMTHGVTQETANLNYENQPGALNESFSDVFGYFNDTEDWDIGEDITVSQPALRSLSNPTKYGQPDNFKNYKNLPNTDAGDRGGVHTNSGIPNKAAYNTITKIGVNKAEQIYYRALTVYLTPSSTFKDAKAALIQSARDLYGSQDAASVEAAWNAVGL

SEQ ID NO: 71329 - protein, 300 aa, Bacillus amyloliquefaciens
AATTGTGTTLKGKTVSLNISSESGKYVLRDLSKPTGTQIITYDLQNREYNLPGTLVSSTTNQFTTSSQRAAVDAHYNLGKVYDYFYQKFNRNSYDNKGGKIVSSVHYGSRYNNAAWIGDQMIYGDGDGSFFSPLSGSMGVTAHEMTHGVTQETANLNYENQPGALNESFSDVFGYFNDTEDWDIGEDITVSQPALRSLSNPTKYGQPDNFKNYKNLPNTDAGDRGGVHTNSGIPNKAAYNTITKIGVNKAEQIYYRALTVYLTPSSTFKDAKAALIQSARDLYGSQDAASVEAAWNAVGL

SEQ ID NO: 71330 - protein, 300 aa, Bacillus amyloliquefaciens
AATTGTGTTLKGKTVSLNISSESGKYVLRDLSKPTGTQIITYDLQNREYNLPGTLVSSTTNQFTESSQRAAVDAHYNLGKVYDYFYQKFNRNSYDNKGGKIVSSVHYGSRYNNAAWIGDQMIYGDGDGSFFSPLSGSMDVTAHEMTHGVTQETANLNYENQPGALNESFSDVFGYFNDTEDWDIGEDITVSQPALRSLSNPTKYGQPDNFKNYKNLPNTDAGDRGGVHTNSGIPNKAAYNTITKIGVNKAEQIYYRALTVYLTPSSTFKDAKAALIQSARDLYGSQDAASVEAAWNAVGL

SEQ ID NO: 71331 - protein, 300 aa, Bacillus amyloliquefaciens
AATTGTGTTLKGKTVSLNISSESGKYVLRDLSKPTGTQIITYDLQNREYNLPGTLVSSTTNQFTTSSQRAAVDAHYNLGKVYDYFYQKFNRNSYDNKGGKIVSSVHYGSRYNNAAWIGDQMIYGDGDGSFFSPLSGSMDVTAHEMTHGVTQETANLNYENQPGALNESFSDVFGYFNDTEDWDIGEDITVSQPALRSLSNPTKYGQPDNFKNYKNLPNTEAGDYGGVHTNSGIPNKSAYNTITKIGVNKAEQIYYRALTVYLTPWSTFKDAKAALIQSARDLYGSQDAASVEAAWNAVGL

SEQ ID NO: 71332 - protein, 300 aa, Bacillus amyloliquefaciens
AATTGTGTTLKGKTVSLNISSESGKYVLRDLSKPTGTQIITYDLQNREYNLPGTLVSSTTNQFTTSSQRAAVDAHYNLGKVYDYFYQKFGRNSYDNKGGKIVSSVHYGSRYNNAAWIGDQMIYGDGDGSFFSPLSGSMDVTAHEMTHGVTQETANLNYENQPGALNESFSDVFGYFNDTEDWDIGEDITVSQPALRSLSNPTKYGQPDNFKNYKNLPNTDAGDRGGVHTNSGIPNKAAYNTITKIGVNKAEQIYYRALTVYLTPSSTFKDAKAALIQSARDLYGSQDAASVEAAWNAVGL

SEQ ID NO: 71333 - protein, 300 aa, Bacillus amyloliquefaciens
AATTGTGTTLKGKTVSLNISSESGKYVLRDLSKPTGTQIITYDLQNREYNLPGTLVSSTTNQFTTSSQRAAVDAHYNLGKVYDYFYQKFNRNSYDNKGGKIVSSVHYGSRYNNAAWIGDQMIYGDGDGSFFSPLSGSMDVTAHEMTHGVTQETANLNYENQPGALNESFSDVFGYFNLTEDWDIGEDITVSQPALRSLSNPTKYGQPDNFKNYKNLPNTDAGDRGGVHTNSGIPNKAAYNTITKIGVNKAEQIYYRALTVYLTPSSTFKDAKAALIQSARDLYGSQDAASVEAAWNAVGL

SEQ ID NO: 71334 - protein, 300 aa, Bacillus amyloliquefaciens
AATTGTGTTLKGKTVSLNISSESGKYVLRDLSKPTGTQIITYDLQNREYNLPGTLVSSTTNQFTTSSQRAAVDAHYNLGKVYDYFYQKFNRNSYDNKGGKIVSSVHYGSRYNNAAWIGDQMIYGDGDGSFFSPLSGSMDVTAHEMTHGVTQETANLNYENQPGALNESFSDVFGYFNDTEDWDIGEDITVSQPALRSLSNPTKYGQPDNFKNYKNLPNTDAGDRGGVHTNSGIPNKAAYNTITKIGVNKAEQIYYRALTVYLTPCSTFKDAKAALIQSARDLYGSQDAASVEAAWNAVGL

SEQ ID NO: 71335 - protein, 300 aa, Bacillus amyloliquefaciens
AATTGTGTTLKGKTVSLNISSESKKYVLRDLSKPTGTQIITYDLQNREYNLPGTLVSSTTNQFTTSSQRAAVDAHYNLGKVYDYFYQKFNRNSYDNKGGKIVSSVHYGSRYNNAAWIGDQMIYGDGDGSFFSPLSGSMDVTAHEMTHGVTQETANLNYENQPGALNESFSDVFGYFNDTEDWDIGEDITVSQPALRSLSNPTKYGQPDNFKNYKNLPNTEAGDYGGVHTNSGIPNKAAYNTITKIGVNKAEQIYYRALTVYLTPSSTFTDAKAALIQSARDLYGSQDAASVEAAWNAVGL

SEQ ID NO: 71336 - protein, 300 aa, Bacillus amyloliquefaciens
AATTGTGTTLKGKTVSLNISSESGKYVLRDLSKPTGTQIITYDLQNREYNLPGTLVSSTTNQFTTSSQRAAVDAHYNLGKVYDYFYQKFNRNSYDNKGGKIVSSVHYGSRYNNAAWIGDQMIYGDGDGSFFSPLSGSMDVTAHEMTHGVTQETANLNYENQPGALNESFSDVFGYFNDTEDWDIGEDITVSQPALRSLSNPTKYGQPDNFKNYKNLPNTDAGDRGGVHTNSGIPNKAAYNTITKIGVNKAEQIYYRALTVYLTPSSTFKDAKAALIQSARDLYGSQDAASVEAAWKAVGL

SEQ ID NO: 71337 - protein, 300 aa, Bacillus amyloliquefaciens
AATTGTGTTLKGKTVSLNISSESGKYVLRDLSKPTGTQIITYDLQNREYNLPGTLVSSTTNQFTTSSQRAAVDAHYNLGKVYDYFYQKFNRNSYDNKGGKIVSSVHYGSRYNNAAWIGDQMIYGDGDGSFFSPLSGSMDVTAHEMTHGVTQETANLNYENQPGALNESFSDVFGYFNDTEDWDIGEDITVSQPALRSLSNPTKYGQPDNFKNYKNLPNTDAGDRGGVHTNSGIPNKAAYNTITKIGVNKAEQIYYRALTVYLTPSSTFVDAKAALIQSARDLYGSQDAASVEAAWNAVGL

SEQ ID NO: 71338 - protein, 300 aa, Bacillus amyloliquefaciens
AATTGTGTTLKEKTVSLNISSESGKYVLRDLSKPTGTQIITYDLQNREYNLPGTLVSSTTNQFTTNSQRAAVDAHYNLGKVYDYFYQKFNRNSYDNKGGKIVSSVHYGSRYNNAAWIGDQMIYGDGDGVFFSPLSGSMDVTAHEMTHGVTQETANLNYENQPGALNESFSDVFGYFNDTEDWDIGEDITVSQPALRSLSNPTKYGQPDNFKNYKNLPNTDAGDYGGVHTNSGIPNKAAYNTITKIGVNKAEQIYYRALTVYLTPSSTFKDAKAALIQSARDLYGSQDAASVEAAWNAVGL

SEQ ID NO: 71339 - protein, 300 aa, Bacillus amyloliquefaciens
AATTGTGTTLKGKTVSLNISSESGKYVLRDLSKPTGTQIITYDLQQREYNLPGKLVSSTTNQFTTSSQRAAVDAHYNLGKVYDYFYQKFNRNSYDNKGGKIVSSVHYGSRYNNAAWIGDQMIYGDGDGSFFSPLSGSMDVTAHEMTHGVTQETANLNYENQPGALNESFSDVFGYFNDTEDWDIGEDITVSQPALRSLSNPTKYGQPDNFKNYKNLPNTDAGDYGGVHTNSGIPNKAAYNTITKIGVNKAEQIYYRALTVYLTPSSTFKDAKAALIQSARDLYGSQDAASVEAAWNAVGL

SEQ ID NO: 71340 - protein, 300 aa, Bacillus amyloliquefaciens
AATTGTGTTLKGKTVSLNISSESGKYVLRDLSKPTGTQIITYDLQNREYNLPGTLVSSTTNQFTTSSQRAAVDAHYNLGKVYDYFYQKFNRNSYDNKGGKIVSSVHYGSRYNNAAWIGDQMIYGDGDGSVFSPLSGSMDVTAHEMTHGVTQHTANLNYENQPGALNESFSDVFGYFNDPEDWDIGEDITVSQPALRSLSNPTKYGQPDNFKNYKNLPNTDAGDYGGVHTNSGIPNKAAYNTITKIGVNKAEQIYYRALTVYLTPSSTFKDAKAALIQSARDLYGSQDAASVEAAWNAVGL

SEQ ID NO: 71341 - protein, 300 aa, Bacillus amyloliquefaciens
AATTGTGTTLKGKTVSLNISSESGKYVLRDLSKPTGTQIITYDLQNREYNLPGTLVSSTTNQFTTSSQRAAVDAHYNLGKVYDYFYQKFNRNSYDNKGGKIVSSVHYGSRYNNAAWIGDQMIYGDGDGSFFSPLSGSMMVTAHEMTHGVTQETANLNYENQPGALNESFSDVFGYFNDTEDWDIGEDITVSQPALRSLSNPTKYGQPDNFKNYKNLPNTDAGDRGGVHTNSGIPNKAAYNTITKIGVNKAEQIYYRALTVYLTPSSTFKDAKAALIQSARDLYGSQDAASVEAAWNAVGL

SEQ ID NO: 71342 - protein, 300 aa, Bacillus amyloliquefaciens
AATTGTGTTLKGKTVSLNISSESGKYVLRDLSKPTGTQIITYDLQNREYNLPGTLVSSTTNQFTTSSQRAAVDAHYNLGKVYDYFYQKFNRNSYDNKGGSIVSSVHYGSRYNNAAWIGDQMIYGDGDGSFFSPLSGSMDVTAHEMTHGVTQETANLNYENQPGALNESFSDVFGYFNDTEDWDIGEDITVSQPALRSLSNPTKYGQPDNFKNYKNLPNTDAGDRGGVHTNSGIPNKAAYNTITKIGVNKAEQIYYRALTVYLTPSSTFKDAKAALIQSARDLYGSQDAASVEAAWNAVGL

SEQ ID NO: 71343 - protein, 300 aa, Bacillus amyloliquefaciens
AATTGTGTTLKGKTVSLNISSESGKYVLRDLSKPTGTQIITYDLQNREYNLPGTLVSSTTNQFTTCSQRAAVDAHYNLGKVYDYFYQKFNRNSYDNKGGKIVSSVHYGSRYNNAAWIGDQMIYGDGDGSFFSPLSGSMDVTAHEMTHGVTQETANLNYENQPGALNESFSDVFGYFNDTEDWDIGEDITVSQPALRSLSNPTKYGQPDNFKNYKNLPNTDAGDRGGVHTNSGIPNKAAYNTITKIGVNKAEQIYYRALTVYLTPSSTFKDAKAALIQSARDLYGSQDAASVEAAWNAVGL

SEQ ID NO: 71344 - protein, 300 aa, Bacillus amyloliquefaciens
AATTGTGTTLKGKTVSLNISSESGKYVLRDLSKPTGTQIITYDLQNREYNLPGTLVSSTTNQFTTSSQRAAVDAHYNLGKVYDYFYQKFNRNSYDNKGGKIVSSVHYGSRYNNAAWIGDQMIYGDGDGSFFSPLSGSMDVTAHEMTHGVTQETANLNYENQPGALNESFSDVFGYFNDTEDWDIGEDITVSQPALRSLSNPTKYGQPDNFKNYKNLPNTDAGDRGGVHTNSGIPNKAAYNTITKIGVNKAEQIYYRALTVYLTPSSTFKDAKLALIQSARDLYGSQDAASVEAAWNAVGL

SEQ ID NO: 71345 - protein, 300 aa, Bacillus amyloliquefaciens
AATTGTGTTLKGKTVSLNISSESGKYVLRDLSKPTGTQIITYDLQNREYNLPGTLVSSWTNQFTTQSQRAAVDAHYNLGKVYDYFYQKFNRNSYDNKGGKIVSSVHYGSRYNNAAWIGDQMIYGDGDGSFFSPLSGSMDVTAHEMTHGVTQETANLNYENQPGALNESFSDVFGYFNDTEDWDIGEDITVSQPALRSLSNPTKYGQPDNFKNYKNLPNTDAGDYGGVHTNSGIPNKAAYNTITKIGVNKAEQIYYRALTVYLTPSSTFKDAKAALIQSARDLYGSQDAASVEAAWNAVGL

SEQ ID NO: 71346 - protein, 300 aa, Bacillus amyloliquefaciens
AATTGTGTTLKGKTVSLNISSESGKYVLRDLSKPTGTQIITYDLQNREYNLPGTLVSSRTNQFTTSSQRAAVDAHYNLGKVYDYFYQKFNRNSYDNKGGKIVSSVHYGSRYNNAAWIGDQMIYGDGDGSFFSPLSGSMDVTAHEMTHGVTQETANLNYENQPGALNESFSDVFGYFNDTEDWDIGEDITVSQPALRSLSNPTKYGQPDNFKNYKNLPNTDAGDYGGVHTNSGIPNKAAYNTITKIGVNKAEQIYYSALTVYLTPSSTFKDAKAALIQSARDLYGSQDAASVEAAWNAVGL

SEQ ID NO: 71347 - protein, 300 aa, Bacillus amyloliquefaciens
AATTGTGTTLKGKTVSLNISSESGKYVLRDLSKPTGTQIITYDLQNREYNLPGTLVSSTTNQFTTSSQRAAVDAHYNLGKVYDYFYQKFNRNSYDNKGGKIVSSVHYGSRYNNAAWIGDQMIYGDGDGSFFSPLSGSMDVTAHEMTHGVTQETANLNYENQPGALNESFSDVFGYFNDTEDWDIGEDITVSQPALRSLSNPTKYGQPDNFKNYKNLPNTDAGDYGGVHTNSGIPNKAAYNTITKIGVNKAEQIYYRALTVYLWPSSTFKDAKAALIQSARDLYGRQDAASVEAAWNAVGL

SEQ ID NO: 71348 - protein, 300 aa, Bacillus amyloliquefaciens
AATTGTGTTLKGKTVSLNISSESGKYVLRDLSKPTGTQIITYDLQNREYNLPGTLVSSTTNQFTTSSQRAAVDAHYNLGKVYDYFYQKFNRNSYDNKGGKIVSSVHYGSRYNNAAWIGDQMIYGDGDGSFFSPLSGSMDVTAHEMTHGVTQETANLNYENQPGALNESFSDVFGYFNDTEDWDIGEDITVSQPALRSLSNPTKYGQPDNFKNYKNLPNTDAGDRGGVHTNSGIPNKAAYNTITKIGVNKAEQIYYRALTVYLTPSSTFKDAKAALIQSARDLYGSQDAASVEAAWNNVGL

SEQ ID NO: 71349 - protein, 300 aa, Bacillus amyloliquefaciens
AATTGTGTTLKGKTVSLNISSESGKYVLRDLSKPTGTQIITYDLQNREYNLPGTLVSSTTNQFTTSSQRAAVDAHYNLGKVYDYFYQKFNRNSYDNKGGKIVSSVHYGSRYNNAAWIGDQMIYGDGDGSFFSPLSGSMDVTAHEMTHGVTQETANLNYENQPGALNESFSDVFGYFNDTEDWDIGEDITVSQPALRSLSNPTKYGQPDNFNNYKNLPNTDAGDRGGVHTNSGIPNKAAYNTITKIGVNKAEQIYYRALTVYLTPSSTFKDAKAALIQSARDLYGSQDAASVEAAWNAVGL

SEQ ID NO: 71350 - protein, 300 aa, Bacillus amyloliquefaciens
AATTGTGTTLKGKTVSLNISSESGKYVLRDLSKPTGTQIITYDLQNREYNLPGTLVSSTTNQFTTSSQRAAVDAHYNLGKVYDYFYQKFNRNSYDNKGGKIVSSVHYGSRYNNAAWIGDQMIYGDGDGSFFSPLSPSMDVTAHEMTHGVTQETANLNYENQPGALNESFSDVFGYFNDTEDWDIGEDITVSQPALRSLSNPTKYGQPDNFKNYKNLPNTDAGDRGGVHTNSGIPNKAAYNTITKIGVNKAEQIYYRALTVYLTPSSTFKDAKAALIQSARDLYGSQDAASVEAAWNAVGL

SEQ ID NO: 71351 - protein, 300 aa, Bacillus amyloliquefaciens
AATTGTGTTLKGKTVSLNISSESGKYVLRDLSKPTGTQIITYDLQNREYNLPGTLVSSTTNQFTTSSQRAAVDAHYNLGKVYDYFYQKFNRNSYDNKGGKIVSSVHYGSRYNNAAWIGDQMIYGDGDGSFFSPLSGSMDVTAHEMTHGVTQETANLNYENQPGALNESFSDVFGYFNDTEDWDIGEDITVSQPALRSLSNPTKYGQPDNFKNYKNLPNTDAGDRGGVHTNSGIPNKAAYNTITKIGVNKAEQIYYRALTVLLTPSSTFKDAKAALIQSARDLYGSQDAASVEAAWNAVGL

SEQ ID NO: 71352 - protein, 300 aa, Bacillus amyloliquefaciens
AATTGTGTTLKGKTVSLNISSESGKYVLRDLSKPTGTQIITYDLQNKEYNLPGKLVSSTTNQFTTSSQRAAVDAHYNLGKVYDYFYQKFNRNSYDNKGGKIVSSVHYGSRYNNAAWIGDQMIYGDGDGSFFSPLSGSMDVTAHEMTHGVTQETANLNYENQPGALNESFSDVFGYFNDTEDWDIGEDITVSQPALRSLSNPTKYGQPDNFKNYKNLPNTDAGDYGGVHTNSGIPNKAAYNTITKIGVNKAEQIYYRALTVYLTPSSTFKDAKAALIQSARDLYGSQDAASVEAAWNAVGL

SEQ ID NO: 71353 - protein, 300 aa, Bacillus amyloliquefaciens
AATTGTGTTLKGKTVSLNISSESGKYVLRDLSKPTGTQIITYDLQNREYYLPGTLVSSTTNQFTTQSQRAAVDAHYNLGKVYDYFYQKFNRNSYDNKGGKIVSSVHYGSRYNNAAWIGDQMIYGDGDGPFFSPLSGSMDVTAHEMTHGVTQETANLNYENQPGALNESFSDVFGYFNDTEDWDIGEDITVSQPALRSLSNPTKYGQPDNFKNYKNLPNTDAGDYGGVHTNSGIPNKAAYNTITKIGVNKAEQIYYRALTVYLTPSSTFKDAKAALIQSARDLYGSQDAASVEAAWNAVGL

SEQ ID NO: 71354 - protein, 300 aa, Bacillus amyloliquefaciens
AATTGTGTTLKGKTVSLNISSESGKYVLRDLSKPTGTQIITYDLQNREVNLPGTLVSSTTNQFTTSSQRAAVDAHYNLGKVYDYFYQKFNRNSYDNKGGKIVSSVHYGSRYNNAAWIGDQMIYGDGDGSFFSPLSGSMDVTAHEMTHGVTQETANLNYENQPGALNESFSDVFGYFNDTEDWDIGEDITVSQPALRSLSNPTKYGQPDNFKNYKNLPNTDAGDRGGVHTNSGIPNKAAYNTITKIGVNKAEQIYYRALTVYLTPSSTFKDAKAALIQSARDLYGSQDAASVEAAWNAVGL

SEQ ID NO: 71355 - protein, 300 aa, Bacillus amyloliquefaciens
AATTGTGTTLKGKTVSLNISSESGKYVLRDLSKPTGTQIITYDLQNREYNLPGTLVSSTTNQFTTSSQRAAVDAHYNLGKVYDYFYQKFNRNSYDNKGGKIVSSVHYGSRYNNAAWIGDQMIYGDGDGSFFSPLSGSMDVTAHEMTHGVTQETANLNYENQPGALNESFSDVFGYFNDTEDWDIGEDITVSQPALRSLSNPTKYGQPDNFKNYKNLPNTDAGDRGGVHTNSGIPNKAAYNTIHKIGVNKAEQIYYRALTVYLTPSSTFKDAKAALIQSARDLYGSQDAASVEAAWNAVGL

SEQ ID NO: 71356 - protein, 300 aa, Bacillus amyloliquefaciens
AATTGTGTTLKGKTVSLNISSESGKYVLRDLSKPTGTQIITYDLQNREYNLPGTLVSSTTNQFTTSSQRAAVDAHYNLGKVYDYFYQKFNRNSYDNKGGKIVSSVHYGSRYNNAAWIGDQMIYGDGDGSFFSPLSGSMDVTAHEMTHGVTQETANLNYENQPGALNESFSDVFGYFNDTEDWDIGEDITVSQPALRSLSNPTKYGQPDNFKNYKNLPNTDAGDRGGVHTNSGIPNKAAYNTIGKIGVNKAEQIYYRALTVYLTPSSTFKDAKAALIQSARDLYGSQDAASVEAAWNAVGL

SEQ ID NO: 71357 - protein, 300 aa, Bacillus amyloliquefaciens
AATTGTGTTLKGKTVSLNISSESGKYVLRDLSKPTGTQIITYDLQNREYNLPGTLVSSTTNQFTTSSQRAAVDAHYNLGKVYDYFYQKFNRNSYDNKGGKIVSSVHYGSRYNNAAWIGDQMIYGDGDGSFFSPLSGSMDVTAHEMTHGVTQETANLNYENQPGALNESFSDVFGYFNDTEDWDIGEDITVSQPALRSLSNPTKYGQPDNFKNYKNLPNTDAGDRGGVHTNSGIPNKAAYNTITKIGVNKAEQIYYRALTVYLTPSSTFKDAKAALIQSARDLYGSQDADSVEAAWNAVGL

SEQ ID NO: 71358 - protein, 300 aa, Bacillus amyloliquefaciens
AATTGTGTTLKGKTVSLNISSESGKYVLRDLSKPTGTQIITYDLQNREYNLPGTLVSSKTNQFTTQSQRAAVDAHYNLGKVYDYFYQKFNRNSYDNKGGKIVSSVHYGSRYNNAAWIGDQMIYGDGDGIFFSPLSGSMDVTAHEMTHGVTQETANLNYENQPGALNESFSDVFGYFNDTEDWDIGEDITVSQPALRSLSNPTKYGQPDNFKNYKNLPNTDAGDYGGVHTNSGIPNKAAYNTITKIGVNKAEQIYYRALTVYLTPSSTFKDAKAALIQSARDLYGSQDAASLEAAWNAVGL

SEQ ID NO: 71359 - protein, 300 aa, Bacillus amyloliquefaciens
AATTGTGTTLKGKTVSLNISSESGKYVLRDLSKPTGTQIITYDLQNREYNLPGTLVSSTTNQFTTSSQRAAVDAHYNLGKVYDYFYQKFNRNSYDNKGGKIVSSVHYGSRYNNAAWIGDQMIYGDGDGSFFSPLSGSMDVTAHEMTHGVTQETANLNYENQPGALNESFSDVFGYFNDTEDWDIGEDITVSQPALRSLSNPTKYGQPDNFKNYKNLPNTDAGDRGGVHTNSGIPNKAAYNTITKIGVNKAEQIYYRALTRYLTPSSTFKDAKAALIQSARDLYGSQDAASVEAAWNAVGL

SEQ ID NO: 71360 - protein, 300 aa, Bacillus amyloliquefaciens
AATTGTGTTLKGKTVSLNISSESGKYVLRDLSKPTGTQIITYDLQNREYNLPGTLVSSTTNQFTTSSQRAAVDAHYNLGKVYDYFYQKFNRNSYDNKGGKIVSSVHYGSRYNNAAWIGDQMIYGDGDGSFFSPLSGSMDVTAHEMTHGVTQETANLNYENQPGALNESFSDVFGYFNKTEDWDIGEDITVSQPALRSLSNPTKYGQPDNFKNYKNLPNTDAGDRGGVHTNSGIPNKAAYNTITKIGVNKAEQIYYRALTVYLTPSSTFKDAKAALIQSARDLYGSQDAASVEAAWNAVGL

SEQ ID NO: 71361 - protein, 300 aa, Bacillus amyloliquefaciens
AATTGTGTTLKGKTVSLNISSESGKYVLRDLSKPTGTQIITYDLQNREYNLPGTLVSSWTNQFTTNSQRAAVDAHYNLGKVYDYFYQKFNRNSYDNKGGKIVSSVHYGSRYNNAAWIGDQMIYGDGDGVFFSPLSGSMDVTAHEMTHGVTQETANLNYENQPGALNESFSDVFGYFNDTEDWDIGEDITVSQPALRSLSNPTKYGQPDNFKNYKNLPNTDAGDYGGVHTNSGIPNKAAYNTITKIGVNKAEQIYYRALTVYLTPSSTFKDAKAALIQSARDLYGSQDAASVEAAWNAVGL

SEQ ID NO: 71362 - protein, 300 aa, Bacillus amyloliquefaciens
AATTGTGTTLKGKTVSLNISSESGKYVLRDLSKPTGTQIITYDLQNREHNLPGTLVSSTTNQFTTSSQRAAVDAHYNLGKVYDYFYQKFNRNSYDNKGGKIVSSVHYGSRYNNAAWIGDQMIYGDGDGSFFSPLSGSMDVTAHEMTHGVTQETANLNYENQPGALNESFSDVFGYFNDTEDWDIGEDITVSQPALRSLSNPTKYGQPDNFKNYKNLPNTDAGDRGGVHTNSGIPNKAAYNTITKIGVNKAEQIYYRALTVYLTPSSTFKDAKAALIQSARDLYGSQDAASVEAAWNAVGL

SEQ ID NO: 71363 - protein, 300 aa, Bacillus amyloliquefaciens
AATTGTGTTLKGKTVSLNISSESGKYVLRDLSKPTGTQIITYDLQNREYNLPGTLVSSTTNQFTTSSQRAAVDAHYNLGKVYDYFYQKFNRNSYDNKGGKIVSSVHYGSRYNNAAWIGDQMIYGDGDGSFFSPLSGSMDVTAHEMTHGVTQETANLNYENQPGALNESFSDVFGYFNDTEDWDIGEDITVSQPALRSLSNPTKYGQPDNFKNYINLPNTDAGDRGGVHTNSGIPNKAAYNTITKIGVNKAEQIYYRALTVYLTPSSTFKDAKAALIQSARDLYGSQDAASVEAAWNAVGL

SEQ ID NO: 71364 - protein, 300 aa, Bacillus amyloliquefaciens
AATTGTGTTLKGKTVSLNISSESGKYVLRDLSKPTGTQIITYDLQNREYNLPGTLVSSTTNQFTTSSQRAAVDAHYNLGKVYDYFYQKFNRNSYDNKGGKIVSSVHYGSRYNNAAWIGDQMIYGDGDGSFFSPLSGSMDVTAHEMTHGVTQETANLNYENQPGALNESFSDVFGYFNDTEDWDIGEDITVSQPALRSLSNPTKYGQPDNFSNYKNLPNTDAGDRGGVHTNSGIPNKAAYNTITKIGVNKAEQIYYRALTVYLTPSSTFKDAKAALIQSARDLYGSQDAASVEAAWNAVGL

SEQ ID NO: 71365 - protein, 300 aa, Bacillus amyloliquefaciens
AATTGTGTTLKGKTVSLNISSESGKYVLRDLSKPTGTQIITYDLQNREYNLPGTLVSSTTNQFTTSSQRAAVDAHYNLGKVYDYFYQKFTRNSYDNKGGKIVSSVHYGSRYNNAAWIGDQMIYGDGDGSFFSPLSGSMDVTAHEMTHGVTQETANLNYENQPGALNESFSDVFGYFNDTEDWDIGEDITVSQPALRSLSNPTKYGQPDNFKNYKNLPNTDAGDRGGVHTNSGIPNKAAYNTITKIGVNKAEQIYYRALTVYLTPSSTFKDAKAALIQSARDLYGSQDAASVEAAWNAVGL

SEQ ID NO: 71366 - protein, 300 aa, Bacillus amyloliquefaciens
AATTGTGTTLKGKTVSLNISSESGKYVLRDLSKPTGTQIITYDLQNREYNLPGTLVSSTTNQFTTSSQRAAVDAHYNLGKVYDYFYQKFNRNSYDNKGGKIVSSVHYGSRYNNAAWIGDQMIYGDGDGSFFSPLSGSMDVTAHEMTHGVTQETANLNYENQPGALNESFSDVFGYFNATEDWDIGEDITVSQPALRSLSNPTKYGQPDNFKNYKNLPNTDAGDRGGVHTNSGIPNKAAYNTITKIGVNKAEQIYYRALTVYLTPSSTFKDAKAALIQSARDLYGSQDAASVEAAWNAVGL

SEQ ID NO: 71367 - protein, 300 aa, Bacillus amyloliquefaciens
AATTGTGTTLKGKTVSLNISSESDKYVLRDLSKPTGTQIITYDLQNREYNLPGTLVSSTTNQFTTSSQRAAVDAHYNLGKVYDYFYQKFNRNSYDNKGGKIVSSVHYGSRYNNAAWIGDQMIYGDGDGSFFSPLSGSMDVTAHEMTHGVTQETANLNYENQPGALNESFSDVFGYFNDTEDWDIGEDITVSQPALRSLSNPTKYGQPDNFKNYKNLPNTDAGDRGGVHTNSGIPNKAAYNTITKIGVNKAEQIYYRALTVYLTPSSTFKDAKAALIQSARDLYGSQDAASVEAAWNAVGL

SEQ ID NO: 71368 - protein, 300 aa, Bacillus amyloliquefaciens
AATTGTGTTLKGKTVSLNISSESGKYVLRDLSKPTGTQIITYDLQNREYNLPGTLVSLTTNQFTTSSQRAAVDAHYNLGKVYDYFYQKFNRNSYDNKGGKIVSSVHYGSRYNNAAWIGDQMIYGDGDGSFFSPLSGSMDVTAHEMTHGVTQETANLNYENQPGALNESFSDVFGYFNDTEDWDIGEDITVSQPALRSLSNPTKYGQPDNFKNYKNLPNTDAGDRGGVHTNSGIPNKAAYNTITKIGVNKAEQIYYRALTVYLTPSSTFKDAKAALIQSARDLYGSQDAASVEAAWNAVGL

SEQ ID NO: 71369 - protein, 300 aa, Bacillus amyloliquefaciens
AATTGTGTTLKGKTVSLNISSESGKYVLRDLSKPTGTQIITYDLQNREDNLPGTLVSSTTNQFTTSSQRAAVDAHYNLGKVYDYFYQKFNRNSYDNKGGKIVSSVHYGSRYNNAAWIGDQMIYGDGDGSFFSPLSGSMDVTAHEMTHGVTQETANLNYENQPGALNESFSDVFGYFNDTEDWDIGEDITVSQPALRSLSNPTKYGQPDNFKNYKNLPNTDAGDRGGVHTNSGIPNKAAYNTITKIGVNKAEQIYYRALTVYLTPSSTFKDAKAALIQSARDLYGSQDAASVEAAWNAVGL

SEQ ID NO: 71370 - protein, 300 aa, Bacillus amyloliquefaciens
AATTGTGTTLKGKTVSLNISSESGKYVLRDLSKPTGTQIITYDLQNREYNLPGTLVSSTTNQFTTSSQRAAVDAHYNLGKVYDYFYQKFNRNSYDNKGGKIVSSVHYGSRYNNAAWIGDQMIYGDGDGSFFSPLSGSMDVTAHEMTHGVTQETANLNYENQPGALNESFSDVFGYFNDTEDWDIGEDITVSQPALRSLSNPTKYGQPDNFKNYKNLPNTDAGDYGGVHTNSGIPNKAAYNTITKIGVNKAEQIYYRALTVYLHPSSTFKDAKHALIQSARDLYGSQDAASVEAAWNAVGL

SEQ ID NO: 71371 - protein, 300 aa, Bacillus amyloliquefaciens
AATTGTGTTLKGKTVSLNISSESGKYVLRDLSKPTGTQIITYDLQNREYNLPGTLVSSTTNQFTTSSQRAAVDAHYNLGKVYDYFYQKFNRNSYDNKGGKIVSSVHYGSRYNNAAWIGDQMIYGDGDGSFFSPLSGSMDVTAHEMTHGVTQETANLNYENQPGALNESFSDVFGYFNDTEDWDIGEDITVSQPALRSLSNPTKYGQPDNFKNYKNLPNTDAGDRGGVHTNSGIPNKAAYNTITGIGVNKAEQIYYRALTVYLTPSSTFKDAKAALIQSARDLYGSQDAASVEAAWNAVGL

SEQ ID NO: 71372 - protein, 300 aa, Bacillus amyloliquefaciens
AATTGTGTTLKGKTVSLNISSESGKYVLRDLSKPTGTQIITYDLQNREYNLPGTLVSSTTNQFTTSSQRAAVDAHYNLGKVYDYFYQKFNRNSYDNKGGKIVSSVHYGSRYNNAAWIGDQMIYGDGDGSFFSPLSGSMDVTAHEMTHGVTQETANLNYENQPGALNESFSDVFGYFNDTEDWDIGEDITVSQPALRSLSNPTKYGQPDNFKNYKNLPNTDAGDRGGVHTNSGIPNKAAYNTITKIGVNKAEQIYYRALTVYLTPSSTFPDAKAALIQSARDLYGSQDAASVEAAWNAVGL

SEQ ID NO: 71373 - protein, 300 aa, Bacillus amyloliquefaciens
AATTGTGTTLKGKTVSLNISSESGKYVLRDLSKPTGTQIITYDLQNREYNLPGTLVSITTNQFTTSSQRAAVDAHYNLGKVYDYFYQKFNRNSYDNKGGKIVSSVHYGSRYNNAAWIGDQMIYGDGDGSFFSPLSGSMDVTAHEMTHGVTQETANLNYENQPGALNESFSDVFGYFNDTEDWDIGEDITVSQPALRSLSNPTKYGQPDNFKNYKNLPNTDAGDRGGVHTNSGIPNKAAYNTITKIGVNKAEQIYYRALTVYLTPSSTFKDAKAALIQSARDLYGSQDAASVEAAWNAVGL

SEQ ID NO: 71374 - protein, 300 aa, Bacillus amyloliquefaciens
AATTGTGTTLKGKTVSLNISSESGKYVLRDLSKPTGTQIITYDLQNREYNLPGTLVSSTTNQFTTSSQRAAVDAHYNLGKVYDYFYQKFNRNSYDNKGGKIVSSVHYGSQYNNAAWIGDQMIYGDGDGSFFSPLSGSMDVTAHEMTHGVTQETANLNYENQPGALNESFSDVFGYFNDTEDWDIGEDITVSQPALRSLSNPTKYGQPDNFKNYKNLPNTDAGDRGGVHTNSGIPNKAAYNTITKIGVNKAEQIYYRALTVYLTPSSTFKDAKAALIQSARDLYGSQDAASVEAAWNAVGL

SEQ ID NO: 71375 - protein, 300 aa, Bacillus amyloliquefaciens
AATTGTGTTLKGKTVSLNISSESGKYVLRDLSKPTGTQIITYDLQNREYNLPGTLVSSTTNQFTTSSQRAAVDAHYNLGKVYDYFYQKFNRNSYDNKGGKIVSSVHYGSRYNNAAWIGDQMIYGDGDGSFFSPLSGSMDVTAHEMTHGVTQETANLNYENQPGALNESFSDVFGYFNDTEDWDIGEDITVSQPALRSLSNPTKYGQPDNFKNYKNLPNTDAGDRGGVHTNSGIPNKAAYNTITKIGVNKAEQIYYRALTVYLTPSSTFIDAKAALIQSARDLYGSQDAASVEAAWNAVGL

SEQ ID NO: 71376 - protein, 300 aa, Bacillus amyloliquefaciens
AATTGTGTTLKGFTVSLNISSESGKYVLRDLSKPTGTQIITYDLQNREYNLPGTLVSSTTNQFTTSSQRAAVDAHYNLGKVYDYFYQKFNRNSYDNKGGKIVSSVHYGSRYNNAAWIGDQMIYGDGDGSFFSPLSGSMDVTAHEMTHGVTQETANLNYENQPGALNESFSDVFGYFNDTEDWDIGEDITVSQPALRSLSNPTKYGQPDNFKNYKNLPNTDAGDRGGVHTNSGIPNKAAYNTITKIGVNKAEQIYYRALTVYLTPSSTFKDAKAALIQSARDLYGSQDAASVEAAWNAVGL

SEQ ID NO: 71377 - protein, 300 aa, Bacillus amyloliquefaciens
AATTGTGTTLKGKTVSLNISSESGKYVLRDLSKPTGTQIITYDLQNREYNLPGTLVSSTTNQFTTSSQRAAVDAHYNLGKVYDYFYQKFNRNSYDNKGGKIVSSVHYGSRYNNAAWIGDQMIYGDGDGSFFSPLSGSMDVTAHEMTHGVTQETANLNYENQPGALNESFSDVFGYFNDTEDWDIGEDITVSQPALRSLCNPTKYGQPDNFKNYKNLPNTDAGDRGGVHTNSGIPNKAAYNTITKIGVNKAEQIYYRALTVYLTPSSTFKDAKAALIQSARDLYGSQDAASVEAAWNAVGL

SEQ ID NO: 71378 - protein, 300 aa, Bacillus amyloliquefaciens
AATTGTGTTLKGKTVSLNISSESGKYVLRDLSKPTGTQIITYDLQNREYNLPGTLVSSTTNQFTTSSQRAAVDAHYNLGKVYDYFYQKFNRNSYDNKGGKIVSSVHYGSRYNNAAWIGDQMIYGDGDGSFFSPLSGSMDVTAHEMTHGVTQETANLNYENQPGALNESFSDVFGYFNDTEDWDIGEDITVSQPALRSLSNPTKYGQPDNFKNYKNLPNTDAGDYGGVHTNSGIPNKAAYNTITKIGVNKAEQIYYRALTVYLTPSSTFKDAKAALIQSARDMYGSRDAASVEAAWNAVGL

SEQ ID NO: 71379 - protein, 300 aa, Bacillus amyloliquefaciens
AATTGTGTTLKGKTVSLNISSESGKYVLRDLSKPTGTQIITYDLQNREYNLPGTLVSSTTNQFTTSSQRAAVDAHYNLGKVYDYFYQKFNRNSYDNKGGKIVSSVHYGSRYNNAAWIGDQMIYGDGDGSFFSPLSGSMDVTAHEMTHGVTQETANLNYENQPGALNESFSDVFGYFNDTEDWDIGEDITVSQPALRSLSNPTKYGQPDNFKNYKNCPNTDAGDRGGVHTNSGIPNKAAYNTITKIGVNKAEQIYYRALTVYLTPSSTFKDAKAALIQSARDLYGSQDAASVEAAWNAVGL

SEQ ID NO: 71380 - protein, 300 aa, Bacillus amyloliquefaciens
AATTGTGTTLKGKTVSLNISSEYWKYVLRDLSKPTGTQIITYDLQNREYNLPGTLVSSTTNQFTTSSQRAAVDAHYNLGKVYDYFYQKFNRNSYDNKGGKIVSSVHYGSRYNNAAWIGDQMIYGDGDGSFFSPLSGSMDVTAHEMTHGVTQETANLNYENQPGALNESFSDVFGYFNDTEDWDIGEDITVSQPALRSLSNPTKYGQPDNFKNYKNLPNTDAGDYGGVHTNSGIPNKAAYNTITKIGVNKAEQIYYRALTVYLTPSSTFKDAKAALIQSARDLYGSQDAASVEAAWNAVGL

SEQ ID NO: 71381 - protein, 300 aa, Bacillus amyloliquefaciens
AATTGTGTTLKGKTVSLNISSESGKYVLRDLSKPTGTQIITYDLQNKEYYLPGTLVSSTTNQFTTSSQRAAVDAHYNLGKVYDYFYQKFNRNSYDNKGGKIVSSVHYGSRYNNAAWIGDQMIYGDGDGSFFSPLSGSMDVTAHEMTHGVTQETANLNYENQPGALNESFSDVFGYFNDTEDWDIGEDITVSQPALRSLSNPTKYGQPDNFKNYKNLPNTDAGDYGGVHTNSGIPNKAAYNTITKIGVNKAEQIYYRALTVYLTPSSTFKDAKAALIQSARDLYGSQDAASVEAAWNAVGL

SEQ ID NO: 71382 - protein, 300 aa, Bacillus amyloliquefaciens
AATTGTGTTLKGKTVSLNISSESGKYVLRDLSKPTGTQIITYDLQNREYNLPGTLVSSTTNQFTTTSQRAAVDAHYNLGKVYDYFYQKFNRNSYDNKGGKIVSSVHYGSRYNNAAWIGDQMIYGDGDGSFFSPLSGSMDVTAHEMTHGVTQETANLNYENQPGALNESFSDVFGYFNDTEDWDIGEDITVSQPALRSLSNPTKYGQPDNFKNYKNLPNTDAGDRGGVHTNSGIPNKAAYNTITKIGVNKAEQIYYRALTVYLTPSSTFKDAKAALIQSARDLYGSQDAASVEAAWNAVGL

SEQ ID NO: 71383 - protein, 300 aa, Bacillus amyloliquefaciens
AATTGTGTTLKGKTVSLNISSESGKYVLRDLSKPTGTQIITYDLQNREYNLPGTLVSSTTNQFTTSSQRAAVDAHYNLGKVYDYFYQKFNRNSYDNKGGKIVSSVHYGSRYNNAAWIGDQMIYGDGDGSFFSPLSGSMDVTAHEMTHGVTQETANLNYENQPGALNESFSDVFGYFNDTEDWDIGTDITVSQPALRSLSNPTKYGQPDNFKNYKNLPNTDAGDRGGVHTNSGIPNKAAYNTITKIGVNKAEQIYYRALTVYLTPSSTFKDAKAALIQSARDLYGSQDAASVEAAWNAVGL

SEQ ID NO: 71384 - protein, 300 aa, Bacillus amyloliquefaciens
AATTGTGTTLKGKTVSLNISSESGKYVLRDLSKPTGTQIITYDLENREYNLPGTLVSSTTNQFTTSSQRAAVDAHYNLGKVYDYFYQKFNRNSYDNKGGKIVSSVHYGSRYNNAAWIGDQMIYGDGDGSFFSPLSGSMDVTAHEMTHGVTQETANLNYENQPGALNESFSDVFGYFNDTEDWDIGEDITVSQPALRSLSNPTKYGQPDNFKNYKNLPNTDAGDRGGVHTNSGIPNKAAYNTITKIGVNKAEQIYYRALTVYLTPSSTFKDAKAALIQSARDLYGSQDAASVEAAWNAVGL

SEQ ID NO: 71385 - protein, 300 aa, Bacillus amyloliquefaciens
AATTGTGTTLKGKTVSLNISSESGKYVLRDLSKPTGTQIITYDLQNREYNLPGTLVSSTTNQFTTSSQRAAVDAHYNLGKVYDYFYQKFERNSYDNKGGKIVSSVHYGSRYNNAAWIGDQMIYGDGDGSFFSPLSGSMDVTAHEMTHGVTQETANLNYENQPGALNESFSDVFGYFNDTEDWDIGEDITVSQPALRSLSNPTKYGQPDNFKNYKNLPNTDAGDRGGVHTNSGIPNKAAYNTITKIGVNKAEQIYYRALTVYLTPSSTFKDAKAALIQSARDLYGSQDAASVEAAWNAVGL

SEQ ID NO: 71386 - protein, 300 aa, Bacillus amyloliquefaciens
AATTGTGTTLKGKTVSLNISSESGKYVLRDLSKPTGTQIITYDLQNREYNLPGTLVSSTTNQFTTSSQRAAVDAHYNLGKVYDYFYQKFNRNSYDNKGGKIVSSVHYGSRYNNAAWIGDQMIYGDGDGSFFSPLSGSMDVTAHEMTHGVTQETANLNYENQPGALNESFSDVFGYFNDTEDWDIGNDITVSQPALRSLSNPTKYGQPDNFKNYKNLPNTDAGDRGGVHTNSGIPNKAAYNTITKIGVNKAEQIYYRALTVYLTPSSTFKDAKAALIQSARDLYGSQDAASVEAAWNAVGL

SEQ ID NO: 71387 - protein, 300 aa, Bacillus amyloliquefaciens
AATTGTGTTLKGKTVSLNISSESGKYVLRDLSKPTGTQIITYDLQNREYNLPGTLVSSTTNQFTTSSQRAAVDAHYNLGKVYDYFYQKFNRNSYDNKGGKIVSSVHYGSRYNNAAWIGDQMIYGDGDGSFFSPLSGSMDVTAHEMTHGVTQETANLNYENQPGALNESFSDVFGYFNDTEDWDIGEDITVSQPALRSLSNPTKYGQPDNFKNYKNLPNTDAGDRGGVHTNSGIPNKAAYNTITFIGVNKAEQIYYRALTVYLTPSSTFKDAKAALIQSARDLYGSQDAASVEAAWNAVGL

SEQ ID NO: 71388 - protein, 300 aa, Bacillus amyloliquefaciens
AATTGTGTTLKGKTVSLNISSESGKYVLRDLSKPTGTQIITYDLQNREYNLPGTLVSSTTNQFTTSSQRAAVDAHYNLGKVYDYFYQKFNRNSYDNKGGKIVSSVHYGSRYNNAAWIGDQMIYGDGDGSFFSPLSGSMDVTAHEMTHGVTQETANLNYENQPGALNESFSDVFGYFNDTEDWDIGEDITVSQPALRSLSNPTKYGQPDNFKNYKNLPNTDAGDRGGVHTNSGIPNKAAYNTITKIGVNKAEQIYYRALTIYLTPSSTFKDAKAALIQSARDLYGSQDAASVEAAWNAVGL

SEQ ID NO: 71389 - protein, 300 aa, Bacillus amyloliquefaciens
AATTGTGTTLKGKTVSLNISSESGKYVLRDLSKPTGTQIITYDLQNREYNLPGTLVSSTTNQFTTSSQRAAVDAHYNLGKVYDYFYQKFNRNSYDNKGGKIVSSVHYGSRYNNAAWIGDQMIYGDGDGSFFSPLSGSMDVTAHEMTHGVTQETANLNYENQPGALNESFSDVFGYFNDTEDWDIGEDITVSQPALRSLSNPTKYGQPDNFKNYKNLPNTDAGDRGGVHTNSGIPNKAAYNTITKIGVNKAEQIYYRALTVYLTPSSTFKDAKAALIQSARDGYGSQDAASVEAAWNAVGL

SEQ ID NO: 71390 - protein, 300 aa, Bacillus amyloliquefaciens
AATTGTGTTLKGKTVSLNISSESGKYVLRDLSKPTGTQIITYDLQNREYNLPGTLVSSTTNQFTTSSQRAAVDAHYNLGKVYDYFYQKFNRNSYDNKGGKIVSSVHYGSRYNNAAWIGDQMIYGDGDGSFFSPLSGSMIVTAHEMTHGVTQETANLNYENQPGALNESFSDVFGYFNDTEDWDIGEDITVSQPALRSLSNPTKYGQPDNFKNYKNLPNTDAGDRGGVHTNSGIPNKAAYNTITKIGVNKAEQIYYRALTVYLTPSSTFKDAKAALIQSARDLYGSQDAASVEAAWNAVGL

SEQ ID NO: 71391 - protein, 300 aa, Bacillus amyloliquefaciens
AATTGTGTTLKGKTVSLNISSESGKYVLRDLSKPTGTQIITYDLQNREYNLPGTLVSSTTNQFTTSSQRAAVDAHYNLGKVYDYFYQKFNRNSYDNKGGKIVSSVHYGSRYNNAAWIGDQMIYGDGDGSFFSPLSGSMDVTAHEMTHGVTQETANLNYENQPGALNESFSDVFGYFNDTEDWDIGEDITVSQPALRSLSNPTKYGQPDNFKNYKNLPNTDAGDYGGVHTNSGIPNKAAYNTITKIGVNKAEQIYYRALTVYLTPSSTFKDAKAALIQSARDLYGSRDARSVEAAWNAVGL

SEQ ID NO: 71392 - protein, 300 aa, Bacillus amyloliquefaciens
AATTGTGTTLKGKTVSLNISSESGKYVLRDLSKPTGTQIITYDLQNREYNLPGTLVSSRTNQFTTNSQRAAVDAHYNLGKVYDYFYQKFNRNSYDNKGGKIVSSVHYGSRYNNAAWIGDQMIYGDGDGVFFSPLSGSMDVTAHEMTHGVTQETANLNYENQPGALNESFSDVFGYFNDTEDWDIGEDITVSQPALRSLSNPTKYGQPDNFKNYKNLPNTDAGDYGGVHTNSGIPNKAAYNTITKIGVNKAEQIYYRALTVYLTPSSTFKDAKAALIQSARDLYGSQDAASVEAAWNAVGL

SEQ ID NO: 71393 - protein, 300 aa, Bacillus amyloliquefaciens
AATTGTGTTLKGKTVSLNISSESGKYVLRDLSKPTGTQIITYDLQNREYNLPGTLVSSTTNQFTTSSQRAAVDAHYNLGKVYDYFYQKFNRNSYDNKGGPIVSSVHYGSRYNNAAWIGDQMIYGDGDGSFFSPLSGSMDVTAHEMTHGVTQETANLNYENQPGALNESFSDVFGYFNDTEDWDIGEDITVSQPALRSLSNPTKYGQPDNFKNYKNLPNTDAGDRGGVHTNSGIPNKAAYNTITKIGVNKAEQIYYRALTVYLTPSSTFKDAKAALIQSARDLYGSQDAASVEAAWNAVGL

SEQ ID NO: 71394 - protein, 300 aa, Bacillus amyloliquefaciens
AATTGTGTTLKGKTVSLNISSESGKYVLRDLSKPTGTQIITYDLQNREYNLPGTLVSSTTNQFTTSSQRAAVDAHYNLGKVYDYFYQKFNRNSYDNKGGKIVSSVHYGSRYNNAAWIGDQMIYGDGDGSFFSPLSGSMDVTAHEMTHGVTQETANLNYENQPGALNESFSDVFGYFNDTEDWDIGEDITVSQPALRSLSNPTKYGQPDNFKNYKNLPNTDAGDYGGVHTNSGIPNKAAYNTITKIGVNKAEQIYYRALTVYLWPSSTFKDAKAALIQSARDLYGWQDAASVEAAWNAVGL

SEQ ID NO: 71395 - protein, 300 aa, Bacillus amyloliquefaciens
AATTGTGTTLKGKTVSLNISSESGKYVLRDLSKPTGTQIITYDLQNREYNLPGTLVSSTTNQFTTSSQRAAVDAHYNLGKVYDYFYQKFNRNSYDNKGGKIVSSVHYGSRYNNAAWIGDQMIYGDGDGSFFSPLSGSMAVTAHEMTHGVTQETANLNYENQPGALNESFSDVFGYFNDTEDWDIGEDITVSQPALRSLSNPTKYGQPDNFKNYKNLPNTDAGDRGGVHTNSGIPNKAAYNTITKIGVNKAEQIYYRALTVYLTPSSTFKDAKAALIQSARDLYGSQDAASVEAAWNAVGL

SEQ ID NO: 71396 - protein, 300 aa, Bacillus amyloliquefaciens
AATTGTGTTLKGKTVSLNISSESGKYVLRDLSKPTGTQIITYDLQNREYNLPGTLVSSTTNQFTTSSQRAAVDAHYNLGKVYDYFYQKFNRNSYDNKGGKIVSSVHYGSRYNNAAWIGDQMIYGDGDGSFFSPLSGSMDVTAHEMTHGVTQETANLNYENQPGALNESFSDVFGYFNDTEDWDIGEDITVSQPALRSLSNPTKYGQPDNFMNYKNLPNTDAGDRGGVHTNSGIPNKAAYNTITKIGVNKAEQIYYRALTVYLTPSSTFKDAKAALIQSARDLYGSQDAASVEAAWNAVGL

SEQ ID NO: 71397 - protein, 300 aa, Bacillus amyloliquefaciens
AATTGTGTTLKGKTVSLNISSESGKYVLRDLSKPTGTQIITYDLQNREYNLPGTLVSSTTNQFTTSSQRAAVDAHYNLGKVYDYFYQKFNRNSYDNKGGKIVSSVHYGSRYNNAAWIGDQMIYGDGDGSFFSPLSGSMDVTAHEMTHGVTQETANLNYENQPGALNESFSDVFGYFNDTEDWDIGEDITVSQPALRSLSNPTKYGQPDNFKNYKNLPNTDAGDRGGVHTNSGIPNKAAYNTITKIGVNKAEQIYYRALTVYLTPSSTFKDAKAALIQSARDLYGSQDAASVERAWNAVGL

SEQ ID NO: 71398 - protein, 300 aa, Bacillus amyloliquefaciens
AATLGTGTTLKGKTVSLNISSESYKYVLRDLSKPTGTQIITYDLQNREYNLPGTLVSSTTNQFTTSSQRAAVDAHYNLGKVYDYFYQKFNRNSYDNKGGKIVSSVHYGSRYNNAAWIGDQMIYGDGDGSFFSPLSGSMDVTAHEMTHGVTQETANLNYENQPGALNESFSDVFGYFNDTEDWDIGEDITVSQPALRSLSNPTKYGQPDNFKNYKNLPNTDAGDYGGVHTNSGIPNKAAYNTITKIGVNKAEQIYYRALTVYLTPSSTFKDAKAALIQSARDLYGSQDAASVEAAWNAVGL

SEQ ID NO: 71399 - protein, 300 aa, Bacillus amyloliquefaciens
AATTGTGTTLKGKTVSLNISSESGKYVLRDLSKPTGTQIITYDLQNREYNLPGTLVSSTTNQFTTSSQRAAVDAHYNLGKVYDYFYQKFNRNSYDNKGGKIVSSVHYGSRYNNAAWIGDQMIYGDGDGSFFSPLSGSMDVTAHEMTHGVTQETANLNYENQPGALNESFSDVFGYFNDTEDWDIGEDITVSQPALRSLSNPTKYGQPDNFKNYKNLPNTDAGDRGGVHTNSGIPNKAAYNTITKIGVNKAEQIYYRALTVYLTPSSTFKDAKAALIQSARDQYGSQDAASVEAAWNAVGL

SEQ ID NO: 71400 - protein, 300 aa, Bacillus amyloliquefaciens
AATTGTGTTLKGKTVSLNISSESGKYVLRDLSKPTGTQIITYDLQNREYNLPGTLVSSTTNQFTTSSQRAAVDAHYNLGKVYDYFYQKFNRNSYDNKGGKIVSSVHYGSRYNNAAWIGDQMIYGDGDGSFFSPLSGSMDVTAHEMTHGVTQETANLNYENQPGALNESFSDVFGYFNDTEDWDIGEDITVSQPALRSLSNPTKYGQPDNFKNYKNLPNTDAGDRGGVHTNSGIPNKAAYNTITKIGVNKAEQIYYRALTVYLTPSSTFKDAKAALIQSARDLYGDQDAASVEAAWNAVGL

SEQ ID NO: 71401 - protein, 300 aa, Bacillus amyloliquefaciens
AATTGTGTTLKGKTVSLNISSESGKYVLRDLSKPTGTQIITYDLQNREYNLPGTLVSSTTNQFTTSSQRAAVDAHYNLGKVYDYFYQKFNRNSYDNKGGKIVSSVHYGSRYNNAAWIGDQMIYGDGDGSFFSPLSGSMDVTAHEMTHGVTQETANLNYENQPGALNESFSDVFGYFNNTEDWDIGEDITVSQPALRSLSNPTKYGQPDNFKNYKNLPNTDAGDRGGVHTNSGIPNKAAYNTITKIGVNKAEQIYYRALTVYLTPSSTFKDAKAALIQSARDLYGSQDAASVEAAWNAVGL

SEQ ID NO: 71402 - protein, 300 aa, Bacillus amyloliquefaciens
AATTGTGTTLKGKTVSLNISSESGKYVLRDLSKPTGTQIITYDLQNREYNLPGPLVSSTTNQFTTSSQRAAVDAHYNLGKVYDYFYQKFNRNSYDNKGGKIVSSVHYGSRYNNAAWIGDQMIYGDGDGSFFSPLSGSMDVTAHEMTHGVTQETANLNYENQPGALNESFSDVFGYFNDTEDWDIGEDITVSQPALRSLSNPTKYGQPDNFKNYKNLPNTDAGDRGGVHTNSGIPNKAAYNTITKIGVNKAEQIYYRALTVYLTPSSTFKDAKAALIQSARDLYGSQDAASVEAAWNAVGL

SEQ ID NO: 71403 - protein, 300 aa, Bacillus amyloliquefaciens
AATTGTGTTLKGKTVSLNISSESGKYVLRDLSKPTGTQIITYDLQNREYNLPGTLVSSTTNQFTTSSQRAAVDAHYNLGKVYDYFYQKFNRNSYDNKGGKIVSSVHYGSRYNNAAWIGDQMIYGDGDGSFFSPLSGSMDVTAHEMTHGVTQETANLNYENQPGALNESFSDVFGYFNDTEDWDIGEDITVSQPALRSLSNPTKYGQPDNFKNYKNLPNTDAGDRGGVHTNSGIPNKAAYNTITKIGVNKAEQIYYRALTVYLTPTSTFKDAKAALIQSARDLYGSQDAASVEAAWNAVGL

SEQ ID NO: 71404 - protein, 300 aa, Bacillus amyloliquefaciens
AATSGTGTTLKGKTVSLNISSEWGKYVLRDLSKPTGTQIITYDLQNREYNLPGTLVSSTTNQFTTSSQRAAVDAHYNLGKVYDYFYQKFNRNSYDNKGGKIVSSVHYGSRYNNAAWIGDQMIYGDGDGSFFSPLSGSMDVTAHEMTHGVTQETANLNYENQPGALNESFSDVFGYFNDTEDWDIGEDITVSQPALRSLSNPTKYGQPDNFKNYKNLPNTDAGDYGGVHTNSGIPNKAAYNTITKIGVNKAEQIYYRALTVYLTPSSTFKDAKAALIQSARDLYGSQDAASVEAAWNAVGL

SEQ ID NO: 71405 - protein, 300 aa, Bacillus amyloliquefaciens
AATTGTGTTLKGKTVSLNISSESGKYVLRDLSKPTGTQIITYDLQNREYNLPGTLVSSTTNQFTTSSQRAAVDAHYNLGKVYDYFYQKFKRNSYDNKGGKIVSSVHYGSRYNNAAWIGDQMIYGDGDGSFFSPLSGSMDVTAHEMTHGVTQETANLNYENQPGALNESFSDVFGYFNDTEDWDIGEDITVSQPALRSLSNPTKYGQPDNFKNYQNLPNTDAGDYGGVHTNSGIPNKAAYNTITKIGVNKAEQIYYRALTVYLTPSSTFKDAKAALIQSARDLYGSQDAASVEAAWNAVGL

SEQ ID NO: 71406 - protein, 300 aa, Bacillus amyloliquefaciens
AATTGTGTTLKGKTVSLNISSESGKYVLRDLSKPTGTQIITYDLQNREYNLPGTLVSSTTNQFTTSSQRAAVDAHYNLGKVYDYFYQKFNRNSYDNKGGKIVSSVHYGSRYNNAAWIGDQMIYGDGDGSFFSPLSGSMDVTAHEMTHGVTQETANLNYENQPGALNESFSDVFGYFNDTEDWDIGEDITVSQPALRSLSNPTKYGQPDNFKNYKNLPNTDAGDYGGVHTNSGIPNKAAYNTITKIGVNKAEQIYYRALTVYLWPSSTFKDAKAALIQSARDLYGPQDAASVEAAWNAVGL

SEQ ID NO: 71407 - protein, 300 aa, Bacillus amyloliquefaciens
AATTGTGTTLKGKTVSLNISSESGKYVLRDLSKPTGTQIITYDLQIREYNLPGTLVSSTTNQFTTSSQRAAVDAHYNLGKVYDYFYQKFNRNSYDNKGGKIVSSVHYGSRYNNAAWIGDQMIYGDGDGSFFSPLSGSMDVTAHEMTHGVTQETANLNYENQPGALNESFSDVFGYFNDTEDWDIGEDITVSQPALRSLSNPTKYGQPDNFKNYKNLPNTDAGDRGGVHTNSGIPNKAAYNTITKIGVNKAEQIYYRALTVYLTPSSTFKDAKAALIQSARDLYGSQDAASVEAAWNAVGL

SEQ ID NO: 71408 - protein, 300 aa, Bacillus amyloliquefaciens
AATTGTGTTLKGKTVSLNISSESGKYVLRDLSKPTGTQIITYDLQNREYNLPGTLVSSTTNQFTTSSQRAAVDAHYNLGKVYDYFYQKFNRNSYDNKGGKIVSSVHYGSRYNNAAWIGDQMIYGDGDGSFFSPLSGSMDVTAHEMTHGVTQETANLNYENQPGALNESFSDVFGYFNDTEDWDIGEDITVSQPALRSLSNPTKYGQPDNFKNYKNLPNTDAGDRGGVHTNSGIPNKAAYNTITSIGVNKAEQIYYRALTVYLTPSSTFKDAKAALIQSARDLYGSQDAASVEAAWNAVGL

SEQ ID NO: 71409 - protein, 300 aa, Bacillus amyloliquefaciens
AATTGTGTTLKGKTVSLNISSESGKYVLRDLSKPTGTQIITYDLQNREYNLPGTLVSSTTNQFTTSSQRAAVDAHYNLGKVYDYFYQKFNRNSYDNKGGKIVSSVHYGSRYNNAAWIGDQMIYGDGDGSFFSPLSGSMDVTAHEMTHGVTQETANLNYENQPGALNESFSDVFGYFNDTEDWDIGDDITVSQPALRSLSNPTKYGQPDNFKNYKNLPNTDAGDRGGVHTNSGIPNKAAYNTITKIGVNKAEQIYYRALTVYLTPSSTFKDAKAALIQSARDLYGSQDAASVEAAWNAVGL

SEQ ID NO: 71410 - protein, 300 aa, Bacillus amyloliquefaciens
AATTGTGTTLKGKTVSLNISSESGKYVLRDLSKPTGTQIITYDLQNREYNLPGTLVSSTTNQFTTSSQRAAVDAHYNLGKVYDYFYQKFNRNSYDNKGGKIVSSVHYGSRYNNAAWIGDQMIYGDGDGSFFSPLSGSMDVTAHEMTHGVTQETANLNYENQPGALNESFSDVFGYFNDTEDWDIGEDITVSQPALRSLSNPTKYGQPDNFQNYKNLPNTDAGDRGGVHTNSGIPNKAAYNTITKIGVNKAEQIYYRALTVYLTPSSTFKDAKAALIQSARDLYGSQDAASVEAAWNAVGL

SEQ ID NO: 71411 - protein, 300 aa, Bacillus amyloliquefaciens
AATTGTGTTLKGKTVSLNISSESGKYVLRDLSKPTGTQIITYDLQPREYNLPGTLVSSTTNQFTTSSQRAAVDAHYNLGKVYDYFYQKFNRNSYDNKGGKIVSSVHYGSRYNNAAWIGDQMIYGDGDGSFFSPLSGSMDVTAHEMTHGVTQETANLNYENQPGALNESFSDVFGYFNDTEDWDIGEDITVSQPALRSLSNPTKYGQPDNFKNYKNLPNTDAGDRGGVHTNSGIPNKAAYNTITKIGVNKAEQIYYRALTVYLTPSSTFKDAKAALIQSARDLYGSQDAASVEAAWNAVGL

SEQ ID NO: 71412 - protein, 300 aa, Bacillus amyloliquefaciens
AATTGTGTTLKGKTVSLNISSESGKYVLRDLSKPTGTQIITYDLQNREYNLPGELVSSTTNQFTTSSQRAAVDAHYNLGKVYDYFYQKFNRNSYDNKGGKIVSSVHYGSRYNNAAWIGDQMIYGDGDGSFFSPLSGSMDVTAHEMTHGVTQETANLNYENQPGALNESFSDVFGYFNDTEDWDIGEDITVSQPALRSLSNPTKYGQPDNFKNYKNLPNTDAGDRGGVHTNSGIPNKAAYNTITKIGVNKAEQIYYRALTVYLTPSSTFKDAKAALIQSARDLYGSQDAASVEAAWNAVGL

SEQ ID NO: 71413 - protein, 300 aa, Bacillus amyloliquefaciens
AATTGTGTTLKGKTVSLNISSESGKYVLRDLSKPTGTQIITYDLQNREYNLPGTLVSSTTNQFTTSSQRAAVDAHYNLGKVYDYFYQKFNRNSYDNKGGKIVSSVHYGSRYNNAAWIGDQMIYGDGDGSFFSPLSGSMDVTAHEMTHGVTQETANLNYENQPGALNESFSDVFGYFNDTEDWDIGSDITVSQPALRSLSNPTKYGQPDNFKNYKNLPNTDAGDRGGVHTNSGIPNKAAYNTITKIGVNKAEQIYYRALTVYLTPSSTFKDAKAALIQSARDLYGSQDAASVEAAWNAVGL

SEQ ID NO: 71414 - protein, 300 aa, Bacillus amyloliquefaciens
AATTGTGTTLKGCTVSLNISSESGKYVLRDLSKPTGTQIITYDLQNREYNLPGTLVSSTTNQFTTSSQRAAVDAHYNLGKVYDYFYQKFNRNSYDNKGGKIVSSVHYGSRYNNAAWIGDQMIYGDGDGSFFSPLSGSMDVTAHEMTHGVTQETANLNYENQPGALNESFSDVFGYFNDTEDWDIGEDITVSQPALRSLSNPTKYGQPDNFKNYKNLPNTDAGDRGGVHTNSGIPNKAAYNTITKIGVNKAEQIYYRALTVYLTPSSTFKDAKAALIQSARDLYGSQDAASVEAAWNAVGL

SEQ ID NO: 71415 - protein, 300 aa, Bacillus amyloliquefaciens
AATTGTGTTLKGKTVSLNISSESGKYVLRDLSKPTGTQIITYDLQNREYGLPGTLVSSTTNQFTTSSQRAAVDAHYNLGKVYDYFYQKFNRNSYDNKGGKIVSSVHYGSRYNNAAWIGDQMIYGDGDGSFFSPLSGSMDVTAHEMTHGVTQETANLNYENQPGALNESFSDVFGYFNDTEDWDIGEDITVSQPALRSLSNPTKYGQPDNFKNYKNLPNTDAGDRGGVHTNSGIPNKAAYNTITKIGVNKAEQIYYRALTVYLTPSSTFKDAKAALIQSARDLYGSQDAASVEAAWNAVGL

SEQ ID NO: 71416 - protein, 300 aa, Bacillus amyloliquefaciens
AATTGTGTTLKGKTVSLNISSESGKYVLRDLSKPTGTQIITYDLQNREYNLPGTLVSSTTNQFTTSSQRAAVDAHYNLGKVYDYFYQKFNRNSYDNKGGKIVSSVHYGSRYNNAAWIGDQMIYGDGDGSFFSPLSGSMDVTAHEMTHGVTQETANLNYENQPGALNESFSDVFGYFNDTEDWDIGEDITVSQPALRSLSNPTKYGQPDNFDNYKNLPNTDAGDRGGVHTNSGIPNKAAYNTITKIGVNKAEQIYYRALTVYLTPSSTFKDAKAALIQSARDLYGSQDAASVEAAWNAVGL

SEQ ID NO: 71417 - protein, 300 aa, Bacillus amyloliquefaciens
AATTGTGTTLKGKMVSLNISSESGKYVLRDLSKPTGTQIITYDLQNREYNLPGTLVSSRTNQFTTSSQRAAVDAHYNLGKVYDYFYQKFNRNSYDNKGGKIVSSVHYGSRYNNAAWIGDQMIYGDGDGVFFSPLSGSMDVTAHEMTHGVTQETANLNYENQPGALNESFSDVFGYFNDTEDWDIGEDITVSQPALRSLSNPTKYGQPDNFKNYKNLPNTDAGDYGGVHTNSGIPNKAAYNTITKIGVNKAEQIYYRALTVYLTPSSTFKDAKAALIQSARDLYGSQDAASVEAAWNAVGL

SEQ ID NO: 71418 - protein, 300 aa, Bacillus amyloliquefaciens
AATTGTGTTLKGKTVSLNISSEDGKYVLRDLSKPTGTQIITYDLQNREYNLPGTLVSSTTNQFTTSSQRAAVDAHYNLGKVYDYFYQKFNRNSYDNKGGKIVSSVHYGSRYNNAAWIGDQMIYGDGDGSFFSPLSGSMDVTAHEMTHGVTQETANLNYENQPGALNESFSDVFGYFNDTEDWDIGEDITVSQPALRSLSNPTKYGQPDNFKNYKNLPNTDAGDRGGVHTNSGIPNKAAYNTITKIGVNKAEQIYYRALTVYLTPSSTFKDAKAALIQSARDLYGSQDAASVEAAWNAVGL

SEQ ID NO: 71419 - protein, 300 aa, Bacillus amyloliquefaciens
AATTGTGTTLKGKTVSLNISSESGKYVLRDLSKPTGTQIITYDLQNREYNLPGTLVSSTTNQFTTSSQRAAVDAHYNLGKVYDYFYQKFNRNSYDNKGGKIVSSVHYGSRYNNAAWIGDQMIYGDGDGSFFSPLSGSMDVTAHEMTHGVTQETANLNYENQPGALNESFSDVFGYFNDTEDWDIGEDITVSQPALRSLSNPTKYGQPDNFKNYKNLPNTDAGDRGGVHTNSGIPNKAAYNTITKIGVNKAEQIYYRALTEYLTPSSTFKDAKAALIQSARDLYGSQDAASVEAAWNAVGL

SEQ ID NO: 71420 - protein, 300 aa, Bacillus amyloliquefaciens
AATTGTGTTLKGKTVSLNISSESGKYVLRDLSKPTGTQIITYDLQNREYNLPGTLVSSTTNQFTTSSQRAAVDAHYNLGKVYDYFYQKFNRNSYDNKGGKIVSSVHYGSRYNNAAWIGDQMIYGDGDGSFFSPLSGSMDVTAHEMTHGVTQETANLNYENQPGALNESFSDVFGYFNDTEDWDIGEDITVSQPALRSLSNPTKYGQPDNFKNYKNLPNTDAGDRGGVHTNSGIPNKAAYNTITKIGVNKAEQIYYRALTVYLWPSSTFKDAKAALIQSARDLYGSQDAASVEAAWNAVGL

SEQ ID NO: 71421 - protein, 300 aa, Bacillus amyloliquefaciens
AATTGTGTTLKGKTVSLNISSESGKYVLRDLSKPTGTQIITYDLQNREYNLPGTLVSSTTNQFTTSSQRAAVDAHYNLGKVYDYFYQKFNRNSYDNKGGKIVSSVHYGSRYNNAAWIGDQMIYGDGDGSFFSPLSGSMDVTAHEMTHGVTQETANLNYENQPGALNESFSDVFGYFNDTEDWDIGEDITVSQPALRSLSNPTKYGQPDNFKNYKNLPNTDAGDRGGVHTNSGIPNKAAYNTITKIGVNKAEQIYYRALTVYLTPSSTFKDAKAALIQSARDLYGPQDAASVEAAWNAVGL

SEQ ID NO: 71422 - protein, 300 aa, Bacillus amyloliquefaciens
AATTGTGTTLKGKTVSLNISSESGKYVLRDLSKPTGTQIITYDLQNREYNLPGTLVSSTTNQFTTSSQRAAVDAHYNLGKVYDYFYQKFNRNSYDNKGGKIVSSVHYGSRYNNAAWIGDQMIYGDGDGSFFSPLSGSMDVTAHEMTHGVTQETANLNYENQPGALNESFSDVFGYFNDTEDWDIGEDITVSQPALRSLSNPTKYGQPDNFKNYKNLPNTDAGDRGGVHTNSGIPNKAAYNTITKIGVNKAEQIYYRALTVYLTPSSTFKDAKAALIQSARDKYGSQDAASVEAAWNAVGL

SEQ ID NO: 71423 - protein, 300 aa, Bacillus amyloliquefaciens
AATTGTGTTLKGKTVSLNISSESGKYVLRDLSKPTGTQIITYDLQNREYFLPGLLVSSTTNQFTTSSQRAAVDAHYNLGKVYDYFYQKFNRNSYDNKGGKIVSSVHYGSRYNNAAWIGDQMIYGDGDGSFFSPLSGSMDVTAHEMTHGVTQETANLNYENQPGALNESFSDVFGYFNDTEDWDIGEDITVSQPALRSLSNPTKYGQPDNFKNYKNLPNTDAGDYGGVHTNSGIPNKAAYNTITKIGVNKAEQIYYRALTVYLTPSSTFKDAKAALIQSARDLYGSQDAASVEAAWNAVGL

SEQ ID NO: 71424 - protein, 300 aa, Bacillus amyloliquefaciens
AATTGTGTTLKGKTVSLNISSESGKYVLRDLSKPTGTQIITYDLQNREYNLPGTLVSSTTNQFTTSSQRAAVDAHYNLGKVYDYFYQKFNRNSYDNKGGKIVSSVHYGSRYNNAAWIGDQMIYGDGDGSFFSPLSGSMDVTAHEMTHGVTQETANLNYENQPGALNESFSDVFGYFNDTEDWDIGEDITVSQPALRSLSNPTKYGQPDNFCNYKNLPNTDAGDRGGVHTNSGIPNKAAYNTITKIGVNKAEQIYYRALTVYLTPSSTFKDAKAALIQSARDLYGSQDAASVEAAWNAVGL

SEQ ID NO: 71425 - protein, 300 aa, Bacillus amyloliquefaciens
AATTGTGTTLKGKTVSLNISSESGKYVLRDLSKPTGTQIITYDLQNREYNLPGTLVSSTTNQFTTSSQRAAVDAHYNLGKVYDYFYQKFNRNSYDNKGGKIVSSVHYGSRYNNAAWIGDQMIYGDGDGSFFSPLSGSMVVTAHEMTHGVTQETANLNYENQPGALNESFSDVFGYFNDTEDWDIGEDITVSQPALRSLSNPTKYGQPDNFKNYKNLPNTDAGDRGGVHTNSGIPNKAAYNTITKIGVNKAEQIYYRALTVYLTPSSTFKDAKAALIQSARDLYGSQDAASVEAAWNAVGL

SEQ ID NO: 71426 - protein, 300 aa, Bacillus amyloliquefaciens
AATTGTGTTLKGKTVSLNISSESGKYVLRDLSKPTGTQIITYDLQNREYNLPGTLVSSTTNQFTTSSQRAAVDAHYNLGKVYDYFYQKFNRNSYDNKGGKIVSSVHYGSRYNNAAWIGDQMIYGDGDGSFFSPLSGSMDVTAHEMTHGVTQETANLNYENQPGALNESFSDVFGYFNDTEDWDIGEDITVSQPALRSLSNPTKYGQPDNFKNYKNLPNTDAGDRGGVHTNSGIPNKAAYNTILKIGVNKAEQIYYRALTVYLTPSSTFKDAKAALIQSARDLYGSQDAASVEAAWNAVGL

SEQ ID NO: 71427 - protein, 300 aa, Bacillus amyloliquefaciens
AATTGTGTTLKGKTVSLNISSESGKYVLRDLSKPTGTQIITYDLQNREYNLPGTLVSSTTNQFTTSSQRAAVDAHYNLGKVYDYFYQKFNRNSYDNKGGKIVSSVHYGSRYNNAAWIGDQMIYGDGDGSFFSPLSGSMDVTAHEMTHGVTQETANLNYENQPGALNESFSDVFGYFNDTEDWDIGEDITVSQPALRSLSNPTKYGQPDNFKNYKNLPNTDAGDRGGVHTNSGIPNKAAYNTITKIGVNKAEQIYYRALTVYLTPSSTFKDAKAALIQSARDLYGSQDAASVEAAWNCVGL

SEQ ID NO: 71428 - protein, 300 aa, Bacillus amyloliquefaciens
AATTGTGTTLKGKTVSLNISSESGKYVLRDLSKPTGTQIITYDLQNREYNLPGTLVSSTTNQFTTSSQRAAVDAHYNLGKVYDYFYQKFNRNSYDNKGGKIVSSVHYGSRYNNAAWIGDQMIYGDGDGSFFSPLSGSMDVTAHEMTHGVTQETANLNYENQPGALNESFSDVFGYFNDTEDWDIGADITVSQPALRSLSNPTKYGQPDNFKNYKNLPNTDAGDRGGVHTNSGIPNKAAYNTITKIGVNKAEQIYYRALTVYLTPSSTFKDAKAALIQSARDLYGSQDAASVEAAWNAVGL

SEQ ID NO: 71429 - protein, 300 aa, Bacillus amyloliquefaciens
AATTGTGTTLKGKTVSLNISSESGKYVLRDLSKPTGTQIITYDLQNREYNLPGTLVSSTTNQFTTSSQRAAVDAHYNLGKVYDYFYQKFNRNSYDNKGGKIVSSVHYGSRYNNAAWIGDQMIYGDGDGSFFSPLSGSMDVTAHEMTHGVTQETANLNYENQPGALNESFSDVFGYFNDTEDWDIGEDITVSQPALRSLSNPTKYGQPDNFKNYKNLPNTDAGDYGGVHINSGIPNKAAYNTITSIGVNKAEQIYYRALTVYLTPSSTFKDAKAALIQSARDLYGSQDAASVEAAWNAVGL

SEQ ID NO: 71430 - protein, 300 aa, Bacillus amyloliquefaciens
AATTGTGTTLKGKTVSLNISSESGKYVLRDLSKPTGTQIITYDLQNREYNLPGTLVSSTTNQFTTSSQRAAVDAHYNLGKVYDYFYQKFNRNSYDNKGGKIVSSVHYGSRYNNAAWIGDQMIYGDGDGSFFSPLSGSMDVTAHEMTHGVTQETANLNYENQPGALNESFSDVFGYFNDTEDWDIGEDITVSQPALRSLSNPTKYGQPDNFKNYMNLPNTDAGDRGGVHTNSGIPNKAAYNTITKIGVNKAEQIYYRALTVYLTPSSTFKDAKAALIQSARDLYGSQDAASVEAAWNAVGL

SEQ ID NO: 71431 - protein, 300 aa, Bacillus amyloliquefaciens
AATTGTGTTLKGKTVSLNISSESGKYVLRDLSKPTGTQIITYDLQNREYNLPGTLVSSTTNQFTTSSQRAAVDAHYNLGKVYDYFYQKFNRNSYDNKGGKIVSSVHYGSRYNNAVWIGDQMIYGDGDGSFFSPLSGSMDVTAHEMTHGVTQETANLNYENQPGALNESFSDVFGYFNDTEDWDIGEDITLSQPALRSLSNPTKYGQPDNFKNYKNLPNTDAGDYGGVHTNSGIPNKAAYNTITKIGVNKAEQIYYRALTVYLTPWSTFKDAKAALIQSARDLYGSQDAASVEAAWNAVGL

SEQ ID NO: 71432 - protein, 300 aa, Bacillus amyloliquefaciens
AATTGTGTTLKGKTVSLNISSESGKYVLRDLSKPTGTQIITYDLQNREYNLPGTLVSSTTNQFTTSSQRAAVDAHYNLGKVYDYFYQKFNRNSYDNKGGKIVSSVHYGSRYNNAAWIGDQMIYGDGDGSFFSPLSGSMDVTAHEMTHGVTQETANLNYENQPGALNESFSDVFGYFNDTEDWDIGEDITVSQPALRSLSNPTKYGQPDNFKNYKNLPNTDAGDRGGVHTNSGIPNKAAYNTITKIGVNKAEQIYYRALTVYLTPSSTFKDAKAALIQSARDFYGSQDAASVEAAWNAVGL

SEQ ID NO: 71433 - protein, 300 aa, Bacillus amyloliquefaciens
AATTGTGTTLKGKTVSLNISSESGKYVLRDLSKPTGTQIITYDLQNREYNLPGTLVSSTTNQFTTSSQRAAVDAHYNLGKVYDYFYQKFNRNSYDNKGGKIVSSVHYGSRYNNAAWIGDQMIYGDGDGSFFSPLSGSMDVTAHEMTHGVTQETANLNYENQPGALNESFSDVFGYFNDTEDWDIGEDITVSQPALRSISNPTKYGQPDNFKNYKNLPNTEAGDYGGVHTNSGIPNKAAYNTITKIGVNKAEQIYYRALTVYLTPQSTFKDAKAALIQSARDLYGSQDAASVEAAWNAVGL

SEQ ID NO: 71434 - protein, 300 aa, Bacillus amyloliquefaciens
AATTGTGTTLKGKTVSLNISSESGKYVLRDLSKPTGTQIITYDLQNREYNLPGTLVSSTTNQFTTSSQRAAVDAHYNLGKVYDYFYQKFNRNSYDNKGGKIVSSVHYGSRYNNAAWIGDQMIYGDGDGSFFSPLSGSMDVTAHEMTHGVTQETANLNYENQPGALNESFSDVFGYFNDTEDWDIGEDITVSQPALRSLSNPTKYGQPDNFKNYKNLPNTDAGDYGGVHTNSGIPNKAAYNTITKIGVNKAEQIYYRALTVYLTPSSTFKDAKAALIQSARDMYGSQDARSVEAAWNAVGL

SEQ ID NO: 71435 - protein, 300 aa, Bacillus amyloliquefaciens
AATTGTGTTLKGKTVSLNISSESGKYVLRDLSKPTGTQIITYDLQNRECNLPGTLVSSTTNQFTTSSQRAAVDAHYNLGKVYDYFYQKFNRNSYDNKGGKIVSSVHYGSRYNNAAWIGDQMIYGDGDGSFFSPLSGSMDVTAHEMTHGVTQETANLNYENQPGALNESFSDVFGYFNDTEDWDIGEDITVSQPALRSLSNPTKYGQPDNFKNYKNLPNTDAGDRGGVHTNSGIPNKAAYNTITKIGVNKAEQIYYRALTVYLTPSSTFKDAKAALIQSARDLYGSQDAASVEAAWNAVGL

SEQ ID NO: 71436 - protein, 300 aa, Bacillus amyloliquefaciens
AATTGTGTTLKGKTVSLNISSESGKYVLRDLSKPTGTQIITYDLQNREYNLPGQLVSSTTNQFTTSSQRAAVDAHYNLGKVYDYFYQKFNRNSYDNKGGKIVSSVHYGSRYNNAAWIGDQMIYGDGDGSFFSPLSGSMDVTAHEMTHGVTQETANLNYENQPGALNESFSDVFGYFNDTEDWDIGEDITVSQPALRSLSNPTKYGQPDNFKNYKNLPNTDAGDRGGVHTNSGIPNKAAYNTITKIGVNKAEQIYYRALTVYLTPSSTFKDAKAALIQSARDLYGSQDAASVEAAWNAVGL

SEQ ID NO: 71437 - protein, 300 aa, Bacillus amyloliquefaciens
AATTGTGTTLKGKTVSLNISSENMKYVLRDLSKPTGTQIITYDLQNREYNLPGTLVSSTTNQFTTSSQRAAVDAHYNLGKVYDYFYQKFNRNSYDNKGGKIVSSVHYGSRYNNAAWIGDQMIYGDGDGSFFSPLSGSMDVTAHEMTHGVTQETANLNYENQPGALNESFSDVFGYFNDTEDWDIGEDITVSQPALRSLSNPTKYGQPDNFKNYKNLPNTDAGDYGGVHTNSGIPNKAAYNTITKIGVNKAEQIYYRALTVYLTPSSTFKDAKAALIQSARDLYGSQDAASVEAAWNAVGL

SEQ ID NO: 71438 - protein, 300 aa, Bacillus amyloliquefaciens
AATTGTGTTLKGKTVSLNISSESGKYVLRDLSKPTGTQIITYDLQNREYNLPGTLVSSTTNQFTTSSQRAAVDAHYNLGKVYDYFYQKFNRNSYDNKGGKIVSSVHYGSRYNNAAWIGDQMIYGDGDGSFFSPLSGSMDVTAHEMTHGVTQETANLNYENQPGALNESFSDVFGYFNDTEDWDIGEDITVSQPALRSLSNPTKYGQPDNFKNYKNLPNTDAGDRGGVHTNSGIPNKAAYNTITKIGVNKAEQIYYRALTAYLTPSSTFKDAKAALIQSARDLYGSQDAASVEAAWNAVGL

SEQ ID NO: 71439 - protein, 300 aa, Bacillus amyloliquefaciens
AATTGTGTTLKGKTVSLNISSESGKYVLRDLSKPTGTQIITYDLQNREYNLPGTLVSSTTNQFTTSSQRAAVDAHYNLGKVYDYFYQKFNRNSYDNKGGKIVSSVHYGSRYNNAAWIGDQMIYGDGDGSFFSPLSGSMDVTAHEMTHGVTQETANLNYENQPGALNESFSDVFGYFNCTEDWDIGEDITVSQPALRSLSNPTKYGQPDNFKNYKNLPNTDAGDRGGVHTNSGIPNKAAYNTITKIGVNKAEQIYYRALTVYLTPSSTFKDAKAALIQSARDLYGSQDAASVEAAWNAVGL

SEQ ID NO: 71440 - protein, 300 aa, Bacillus amyloliquefaciens
AATTGTGTTLKGKTVSLNISSESGKYVLRDLSKPTGTQIITYDLQNREYNLPGTLVSSTTNQFTTSSQRAAVDAHYNLGKVYDYFYQKFNRNSYDNKGGKIVSSVHYGSRYNNAAWIGDQMIYGDGDGSFFSPLSGSMDVTAHEMTHGVTQETANLNYENQPGALNESFSDVFGYFNDTEDWDIGEDITVSQPALRSLSNPTKYGQPDNFKNYKNLPNTDAGDRGGVHTNSGIPNKAAYNTITKIGVNKAEQIYYRALTVYLTPSSTFKDAKNALIQSARDLYGSQDAASVEAAWNAVGL

SEQ ID NO: 71441 - protein, 300 aa, Bacillus amyloliquefaciens
AATSGTGTTLKGKTVSLNISSEYGKYVLRDLSKPTGTQIITYDLQNREYNLPGTLVSSTTNQFTTSSQRAAVDAHYNLGKVYDYFYQKFNRNSYDNKGGKIVSSVHYGSRYNNAAWIGDQMIYGDGDGSFFSPLSGSMDVTAHEMTHGVTQETANLNYENQPGALNESFSDVFGYFNDTEDWDIGEDITVSQPALRSLSNPTKYGQPDNFKNYKNLPNTDAGDYGGVHTNSGIPNKAAYNTITKIGVNKAEQIYYRALTVYLTPSSTFKDAKAALIQSARDLYGSQDAASVEAAWNAVGL

SEQ ID NO: 71442 - protein, 300 aa, Bacillus amyloliquefaciens
AATTGTGTTLKGKTVSLNISSESGKYVLRDLSKPTGTQIITYDLQNREYNLPGTLVSSTTNQFTTSSQRAAVDAHYNLGKVYDYFYQKFNRNSYDNKGGKIVSSVHYGSRYNNAAWIGDQMIYGDGDGSFFSPLSGSMDVTAHEMTHGVTQETANLNYENQPGALNESFSDVFGYFNDTEDWDIGEDITVSQPALRSLSNPTKYGQPDNFKNYKNLPNTDAGDRGGVHTNSGIPNKAAYNTITKIGVNKAEQIYYRALTVYLTPSSTFKDAKAALIQSARDLYGSQDAASVEAAWVAVGL

SEQ ID NO: 71443 - protein, 300 aa, Bacillus amyloliquefaciens
AATTGTGTTLKGKTVSLNISSESGKYVLRDLSKPTGTQIITYDLQNREYNLPGTLVSSTTNQFTTSSQRAAVDAHYNLGKVYDYFYQKFNRNSYDNKGGKIVSSVHYGSRYNNAAWIGDQMIYGDGDGSFFSPLSGSMDVTAHEMTHGVTQETANLNYENQPGALNESFSDVFGYFNDTEDWDIGEDITVSQPALRSLSNPTKYGQPDNFKNYKNLPNTDAGDRGGVHTNSGIPNKAAYNTITKIGVNKAEQIYYRALTVYLTPSSTFKDAKAALIQSARDLYGRQDAASVEAAWNAVGL

SEQ ID NO: 71444 - protein, 300 aa, Bacillus amyloliquefaciens
AATTGTGTTLKGKTVSLNISSESGKYVLRDLSKPTGTQIITYDLQNREYNLPGTLVSSTTNQFTTSSQRAAVDAHYNLGKVYDYFYQKFNRNSYDNKGGKIVSSVHYGSRYNNAAWIGDQMIYGDGDGSFFSPLSGSMDVTAHEMTHGVTQETANLNYENQPGALNESFSDVFGYFNDTEDWDIGEDITVSQPALRSLSNPTKYGQPDNFKNYKNLPNTDAGDYGGVHTNSGIPNKAAYNTITKIGVNKAEQIYYRALTVYLWPSSTFKDAKHALIQSARDLYGSQDAASVEAAWNAVGL

SEQ ID NO: 71445 - protein, 300 aa, Bacillus amyloliquefaciens
AATTGTGTTLKGKTVSLNISSESGKYVLRDLSKPTGTQIITYDLQNREYNLPGTLVSSTTNQFTTSSQRAAVDAHYNLGKVYDYFYQKFNRNSYDNKGGFIVSSVHYGSRYNNAAWIGDQMIYGDGDGSFFSPLSGSMDVTAHEMTHGVTQETANLNYENQPGALNESFSDVFGYFNDTEDWDIGEDITVSQPALRSLSNPTKYGQPDNFKNYKNLPNTDAGDRGGVHTNSGIPNKAAYNTITKIGVNKAEQIYYRALTVYLTPSSTFKDAKAALIQSARDLYGSQDAASVEAAWNAVGL

SEQ ID NO: 71446 - protein, 300 aa, Bacillus amyloliquefaciens
AATTGTGTTLKGKTVSLNISSESGKYVLRDLSKPTGTQIITYDLQNREYNLPGTLVSSTTNQFTTSSQRAAVDAHYNLGKVYDYFYQKFNRNSYDNKGGKIVSSVHYGSRYNNAAWIGDQMIYGDGDGSFFSPLSGSMDVTAHEMTHGVTQETANLNYENQPGALNESFSDVFGYFNDTEDWDIGEDITVSQPALRSLSNPTKYGQPDNFKNYVNLPNTDAGDRGGVHTNSGIPNKAAYNTITKIGVNKAEQIYYRALTVYLTPSSTFKDAKAALIQSARDLYGSQDAASVEAAWNAVGL

SEQ ID NO: 71447 - protein, 300 aa, Bacillus amyloliquefaciens
AATTGTGTTLKGKTVSLNISSESGKYVLRDLSKPTGTQIITYDLQNREYNLPGTLVSSTTNQFTTSSQRAAVDAHYNLGKVYDYFYQKFNRNSYDNKGGKIVSSVHYGSRYNNAAWIGDQMIYGDGDGSFFSPLSGSMDVTAHEMTHGVTQETANLNYENQPGALNESFSDVFGYFNDTEDWDIGEDITVSQPALRSLSNPTKYGQPDNFKNYKNLPNTDAGDRGGVHTNSGIPNKAAYNTITKIGVNKAEQIYYRALTVYLTPSSTFKDAKAALIQSARDNYGSQDAASVEAAWNAVGL

SEQ ID NO: 71448 - protein, 300 aa, Bacillus amyloliquefaciens
AATTGTGTTLKGKTVSLNISSESGKYVLRDLSKPTGTQIITYDLQNREYNLPGTLVSSTTNQFTTSSQRAAVDAHYNLGKVYDYFYQKFNRNSYDNKGGKIVSSVHYGSRYNNAAWIGDQMIYGDGDGSFFSPLSGSMDVTAHEMTHGVTQETANLNYENQPGALNESFSDVFGYFNDTEDWDIGEDITVSQPALRSLSNPTKYGQPDNFKNYKNLPNTDAGDRGGVHTNSGIPNKAAYNTITKIGVNKAEQIYYRALTVYLTPSSTFKDAKKALIQSARDLYGSQDAASVEAAWNAVGL

SEQ ID NO: 71449 - protein, 300 aa, Bacillus amyloliquefaciens
AATTGTGTTLKGKTVSLNISSESGKYVLRDLSKPTGTQIITYDLQNREYNLPGTLVSSTTNQFTTPSQRAAVDAHYNLGKVYDYFYQKFNRNSYDNKGGKIVSSVHYGSRYNNAAWIGDQMIYGDGDGSFFSPLSGSMDVTAHEMTHGVTQETANLNYENQPGALNESFSDVFGYFNDTEDWDIGEDITVSQPALRSLSNPTKYGQPDNFKNYKNLPNTDAGDRGGVHTNSGIPNKAAYNTITKIGVNKAEQIYYRALTVYLTPSSTFKDAKAALIQSARDLYGSQDAASVEAAWNAVGL

SEQ ID NO: 71450 - protein, 300 aa, Bacillus amyloliquefaciens
AATTGTGTTLKGKTVSLNISSESGKYVLRDLSKPTGTQIITYDLQNREYNLPGTLVSSTTNQFTTSSQRAAVDAHYNLGKVYDYFYQKFNRNSYDNKGGKIVSSVHYGSRYNNAAWIGDQMIYGDGDGSFFSPLSGSMDVTAHEMTHGVTQETANLNYENQPGALNESFSDVFGYFNDTEDWDIGEDITVSQPALRSLSNPTKYGQPDNFKNYKNLPNTDAGDRGGVHTNSGIPNKAAYNTITKIGVNKAEQIYYRALTVYLTPSSTFKDAKDALIQSARDLYGSQDAASVEAAWNAVGL

SEQ ID NO: 71451 - protein, 300 aa, Bacillus amyloliquefaciens
AATTGTGTTLKGKTVSLNISSESGKYVLRDLSKPTGTQIITYDLQNSEYNLPGTLVSSTTNQFTTSSQRAAVDAHYNLGKVYDYFYQKFNRNSYDNKGGKIVSSVHYGSRYNNAAWIGDQMIYGDGDGSFFSPLSGSMDVTAHEMTHGVTQETANLNYENQPGALNESFSDVFGYFNDTEDWDIGEDITVSQPALRSLSNPTKYGQPDNFKNYKNLPNTDAGDRGGVHTNSGIPNKAAYNTITKIGVNKAEQIYYRALTVYLTPSSTFKDAKAALIQSARDLYGSQDAASVEAAWNAVGL

SEQ ID NO: 71452 - protein, 300 aa, Bacillus amyloliquefaciens
AATTGTGTTLKGKTVSLNISSESGKYVLRDLSKPTGTQIITYDLQNREYNLPGTFVSSWTNQFTTSSQRAAVDAHYNLGKVYDYFYQKFNRNSYDNKGGKIVSSVHYGSRYNNAAWIGDQMIYGDGDGVFFSPLSGSMDVTAHEMTHGVTQETANLNYENQPGALNESFSDVFGYFNDTEDWDIGEDITVSQPALRSLSNPTKYGQPDNFKNYKNLPNTDAGDYGGVHTNSGIPNKAAYNTITKIGVNKAEQIYYRALTVYLTPSSTFKDAKAALIQSARDLYGSQDAASVEAAWNAVGL

SEQ ID NO: 71453 - protein, 300 aa, Bacillus amyloliquefaciens
AATTGTGTTLKGKTVSLNISSESGKYVLRDLSKPTGTQIITYDLCNREYNLPGTLVSSTTNQFTTSSQRAAVDAHYNLGKVYDYFYQKFNRNSYDNKGGKIVSSVHYGSRYNNAAWIGDQMIYGDGDGSFFSPLSGSMDVTAHEMTHGVTQETANLNYENQPGALNESFSDVFGYFNDTEDWDIGEDITVSQPALRSLSNPTKYGQPDNFKNYKNLPNTDAGDRGGVHTNSGIPNKAAYNTITKIGVNKAEQIYYRALTVYLTPSSTFKDAKAALIQSARDLYGSQDAASVEAAWNAVGL

SEQ ID NO: 71454 - protein, 300 aa, Bacillus amyloliquefaciens
AATTGTGTTLKGKTVSLNISSESGKYVLRDLSKPTGTQIITYDLQNREYNLPGTLVSSTTNQFTTSSQRAAVDAHYNLGKVYDYFYQKFNRNSYDNKGGKIVSSVHYGSRYNNAAWIGDQMIYGDGDGSFFSPLSGSMDVTAHEMTHGVTQETANLNYENQPGALNESFSDVFGYFNWTEDWDIGEDITVSQPALRSLSNPTKYGQPDNFKNYKNLPNTDAGDRGGVHTNSGIPNKAAYNTITKIGVNKAEQIYYRALTVYLTPSSTFKDAKAALIQSARDLYGSQDAASVEAAWNAVGL

SEQ ID NO: 71455 - protein, 300 aa, Bacillus amyloliquefaciens
AATTGTGTTLKGKTVSLNISSESGKYVLRDLSKPTGTQIITYDLQNREYNLPGCLVSSTTNQFTTSSQRAAVDAHYNLGKVYDYFYQKFNRNSYDNKGGKIVSSVHYGSRYNNAAWIGDQMIYGDGDGSFFSPLSGSMDVTAHEMTHGVTQETANLNYENQPGALNESFSDVFGYFNDTEDWDIGEDITVSQPALRSLSNPTKYGQPDNFKNYKNLPNTDAGDRGGVHTNSGIPNKAAYNTITKIGVNKAEQIYYRALTVYLTPSSTFKDAKAALIQSARDLYGSQDAASVEAAWNAVGL

SEQ ID NO: 71456 - protein, 300 aa, Bacillus amyloliquefaciens
AATTGTGTTLKGKTVSLNISSESGKYVLRDLSKPTGTQIITYDLQNREYNLPGTLVSSTTNQFTTSSQRAAVDAHYNLGKVYDYFYQKFNRNSYDNKGGKIVSSVHYGSRYNNAAWIGDQMIYGDGDGSFFSPLSGSMDVTAHEMTHGVTQETANLNYENQPGALNESFSDVFGYFNDTEDWDIGEDITVSQPALRSLSNPTKYGQPDNFKNYKNLPNTDAGDRGGVHTNSGIPNKAAYNTITKIGVNKAEQIYYRALTVYLYPSSTFKDAKAALIQSARDLYGSQDAASVEAAWNAVGL

SEQ ID NO: 71457 - protein, 300 aa, Bacillus amyloliquefaciens
AATTGTGTTLKGKTVSLNISSESGKYVLRDLSKPTGTQIITYDLQNKEYFLPGTLVSSTTNQFTTSSQRAAVDAHYNLGKVYDYFYQKFNRNSYDNKGGKIVSSVHYGSRYNNAAWIGDQMIYGDGDGSFFSPLSGSMDVTAHEMTHGVTQETANLNYENQPGALNESFSDVFGYFNDTEDWDIGEDITVSQPALRSLSNPTKYGQPDNFKNYKNLPNTDAGDYGGVHTNSGIPNKAAYNTITKIGVNKAEQIYYRALTVYLTPSSTFKDAKAALIQSARDLYGSQDAASVEAAWNAVGL

SEQ ID NO: 71458 - protein, 300 aa, Bacillus amyloliquefaciens
AATTGTGTTLKGKTVSLNISSESGKYVLRDLSKPTGTQIITYDLQNKEYWLPGTLVSSTTNQFTTSSQRAAVDAHYNLGKVYDYFYQKFNRNSYDNKGGKIVSSVHYGSRYNNAAWIGDQMIYGDGDGSFFSPLSGSMDVTAHEMTHGVTQETANLNYENQPGALNESFSDVFGYFNDTEDWDIGEDITVSQPALRSLSNPTKYGQPDNFKNYKNLPNTDAGDYGGVHTNSGIPNKAAYNTITKIGVNKAEQIYYRALTVYLTPSSTFKDAKAALIQSARDLYGSQDAASVEAAWNAVGL

SEQ ID NO: 71459 - protein, 300 aa, Bacillus amyloliquefaciens
AATTGTGTTLKGKTVSLNISSESGKYVLRDLSKPTGTQIITYDLQNREYNLPGTLVSSTTNQFTTSSQRAAVDAHYNLGKVYDYFYQKFNRNSYDNKGGKIVSSVHYGSRYNNAAWIGDQMIYGDGDGSFFSPLSGSMSVTAHEMTHGVTQETANLNYENQPGALNESFSDVFGYFNDTEDWDIGEDITVSQPALRSLSNPTKYGQPDNFKNYKNLPNTDAGDRGGVHTNSGIPNKAAYNTITKIGVNKAEQIYYRALTVYLTPSSTFKDAKAALIQSARDLYGSQDAASVEAAWNAVGL

SEQ ID NO: 71460 - protein, 300 aa, Bacillus amyloliquefaciens
AATTGTGTTLKGKTVSLNISSEKGKYVLRDLSKPTGTQIITYDLQNREYNLPGTLVSSTTNQFTTSSQRAAVDAHYNLGKVYDYFYQKFNRNSYDNKGGKIVSSVHYGSRYNNAAWIGDQMIYGDGDGSFFSPLSGSMDVTAHEMTHGVTQETANLNYENQPGALNESFSDVFGYFNDTEDWDIGEDITVSQPALRSLSNPTKYGQPDNFKNYKNLPNTDAGDYGGVHTNSGIPNKAAYNTITSIGVNKAEQIYYRALTVYLTPSSTFKDAKAALIQSARDLYGSQDAASVEAAWNAVGL

SEQ ID NO: 71461 - protein, 300 aa, Bacillus amyloliquefaciens
AATTGTGTTLKGKTVSLNISSESGKYVLRDLSKPTGTQIITYDLQNREYNLPGTLVSSTTNQFTTSSQRAAVDAHYNLGKVYDYFYQKFNRNSYDNKGGKIVSSVHYGSRYNNAAWIGDQMIYGDGDGSFFSPLSVSMDVTAHEMTHGVTQETANLNYENQPGALNESFSDVFGYFNDTEDWDIGEDITVSQPALRSLSNPTKYGQPDNFKNYKNLPNTDAGDRGGVHTNSGIPNKAAYNTITKIGVNKAEQIYYRALTVYLTPSSTFKDAKAALIQSARDLYGSQDAASVEAAWNAVGL

SEQ ID NO: 71462 - protein, 300 aa, Bacillus amyloliquefaciens
AATTGTGTTLKGKTVSLNISSESGKYVLRDLSKPTGTQIITYDLQNREYNLPGTLVSSTTNQFTTSSQRAAVDAHYNLGKVYDYFYQKFNRNSYDNKGGKIVSSVHYGSRYNNAAWIGDQMIYGDGDGSFFSPLSGSMDVTAHEMTHGVTQETANLNYENQPGALNESFSDVFGYFNDTEDWDIGEDITVSQPALRSLSNPTKYGQPDNFKNYKNLPNTDAGDRGGVHTNSGIPNKAAYNTITKIGVNKAEQIYYRALTVCLTPSSTFKDAKAALIQSARDLYGSQDAASVEAAWNAVGL

SEQ ID NO: 71463 - protein, 300 aa, Bacillus amyloliquefaciens
AATTGTGTTLKGKTVSLNISSESGKYVLRDLSKPTGTQIITYDLQNREYNLPGTLVSSTTNQFTTSSQRAAVDAHYNLGKVYDYFYQKFNRNSYDNKGGKIVSSVHYGSRYNNAAWIGDQMIYGDGDGSFFSPLSGSMDVTAHEMTHGVTQETANLNYENQPGALNESFSDVFGYFNDTEDWDIGEDITVSQPALRSLSNPTKYGQPDNFKNYKNLPNTDAGDRGGVHTNSGIPNKAAYNTITKIGVNKAEQIYYRALTVYLTPSSTFKDAKAALIQSAWDLYGSQDAASVEAAWNAVGL

SEQ ID NO: 71464 - protein, 300 aa, Bacillus amyloliquefaciens
AATTGTGTTLKGKTVSLNISSESGKYVLRDLSKPTGTQIITYDLQNREYNLPGTLVSSTTNQFTTSSQRAAVDAHYNLGKVYDYFYQKFNRNSYDNKGGKIVSSVHYGSRYNNAAWIGDQMIYGDGDGSFFSPLSGSMDVTAHEMTHGVTQETANLNYENQPGALNESFSDVFGYFNDTEDWDIGEDITVSQPALRSLSNPTKYGQPDNFKNYKNLPNTDAGDRGGVHTNSGIPNKAAYNTITKIGVNKAEQIYYRALTGYLTPSSTFKDAKAALIQSARDLYGSQDAASVEAAWNAVGL

SEQ ID NO: 71465 - protein, 300 aa, Bacillus amyloliquefaciens
AATTGTGTTLKGKTVSLNISSESGKYVLRDLSKPTGTQIITYDLQNREYNLPGTLVSSTTNQFTTSSQRAAVDAHYNLGKVYDYFYQKFNRNSYDNKGGEIVSSVHYGSRYNNAAWIGDQMIYGDGDGSFFSPLSGSMDVTAHEMTHGVTQETANLNYENQPGALNESFSDVFGYFNDTEDWDIGEDITVSQPALRSLSNPTKYGQPDNFKNYKNLPNTDAGDRGGVHTNSGIPNKAAYNTITKIGVNKAEQIYYRALTVYLTPSSTFKDAKAALIQSARDLYGSQDAASVEAAWNAVGL

SEQ ID NO: 71466 - protein, 300 aa, Bacillus amyloliquefaciens
AATTGTGTTLKGKTVSLNISSESGKYVLRDLSKPTGTQIITYDLQNREYNLPGTLVSSTTNQFTTSSQRAAVDAHYNLGKVYDYFYQKFNRNSYDNKGGYIVSSVHYGSRYNNAAWIGDQMIYGDGDGSFFSPLSGSMDVTAHEMTHGVTQETANLNYENQPGALNESFSDVFGYFNDTEDWDIGEDITVSQPALRSLSNPTKYGQPDNFKNYKNLPNTDAGDRGGVHTNSGIPNKAAYNTITKIGVNKAEQIYYRALTVYLTPSSTFKDAKAALIQSARDLYGSQDAASVEAAWNAVGL

SEQ ID NO: 71467 - protein, 300 aa, Bacillus amyloliquefaciens
AATTGTGTTLKGKTVSLNISSESGKYVLRDLSKPTGTQIITYDLQNREYNLPGTLVSSTTNQFTTSSQRAAVDAHYNLGKVYDYFYQKFNRNSYDNKGGKIVSSVHYGSRYNNAAWIGDQMIYGDGDGSFFSPLSGSMDVTAHEMTHGVTQETANLNYENQPGALNESFSDVFGYFNDTEDWDIGEDITVSQPALRSLSNPTKYGQPDNFKNYKNLPNTDAGDRGGVHTNSGIPNKAAYNTITKIGVNKAEQIYYRALTVYLTPSSTFKDAKAALIQSASDLYGSQDAASVEAAWNAVGL

SEQ ID NO: 71468 - protein, 300 aa, Bacillus amyloliquefaciens
AATTGTGTTLKGKTVSLNISSESGKYVLRDLSKPTGTQIITYDLQNREYNLPGTLVSSTTNQFTTSSQRAAVDAHYNLGKVYDYFYQKFNRNSYDNKGGKIVSSVHYGSRYNNAAWIGDQMIYGDGDGSFFSPLSGSMDVTAHEMTHGVTQETANLNYENQPGALNESFSDVFGYFNDTEDWDIGEDITVSQPALRSLSNPTKYGQPDNFKNYKNLPNDDAGDRGGVHTNSGIPNKAAYNTITKIGVNKAEQIYYRALTVYLTPSSTFKDAKAALIQSARDLYGSQDAASVEAAWNAVGL

SEQ ID NO: 71469 - protein, 300 aa, Bacillus amyloliquefaciens
AATTGTGTTLKGHTVSLNISSESGKYVLRDLSKPTGTQIITYDLQNREYNLPGTLVSSTTNQFTTSSQRAAVDAHYNLGKVYDYFYQKFNRNSYDNKGGKIVSSVHYGSRYNNAAWIGDQMIYGDGDGSFFSPLSGSMDVTAHEMTHGVTQETANLNYENQPGALNESFSDVFGYFNDTEDWDIGEDITVSQPALRSLSNPTKYGQPDNFKNYKNLPNTDAGDRGGVHTNSGIPNKAAYNTITKIGVNKAEQIYYRALTVYLTPSSTFKDAKAALIQSARDLYGSQDAASVEAAWNAVGL

SEQ ID NO: 71470 - protein, 300 aa, Bacillus amyloliquefaciens
AATTGTGTTLKGKTVSLNISSESGKYVLRDLSKPTGTQIITYDLQNREENLPGTLVSSTTNQFTTSSQRAAVDAHYNLGKVYDYFYQKFNRNSYDNKGGKIVSSVHYGSRYNNAAWIGDQMIYGDGDGSFFSPLSGSMDVTAHEMTHGVTQETANLNYENQPGALNESFSDVFGYFNDTEDWDIGEDITVSQPALRSLSNPTKYGQPDNFKNYKNLPNTDAGDRGGVHTNSGIPNKAAYNTITKIGVNKAEQIYYRALTVYLTPSSTFKDAKAALIQSARDLYGSQDAASVEAAWNAVGL

SEQ ID NO: 71471 - protein, 300 aa, Bacillus amyloliquefaciens
AATTGTGTTLKGKTVSLNISSESGKYVLRDLSKPTGTQIITYDLQNREYNLPGTLVSSTTNQFTTSSQRAAVDAHYNLGKVYDYFYQKFNRNSYDNKGGKIVSSVHYGSRYNNAAWIGDQMIYGDGDGSFFSPLSGSMDVTAHEMTHGVTQETANLNYENQPGALNESFSDVFGYFNDTEDWDIGEDITVSQPALRSLSNPTKYGQPDNFKNYKNLPNTDAGDRGGVHTNSGIPNKAAYNTITKIGVNKAEQIYYRALTVYLTPSSTFKDAKAALIQSAMDLYGSQDAASVEAAWNAVGL

SEQ ID NO: 71472 - protein, 300 aa, Bacillus amyloliquefaciens
AATTGTGTTLKGKTVSLNISSESGKYVLRDLSKPTGTQIITYDLQNREYNLPGTLVSSTTNQFTTSSQRAAVDAHYNLGKVYDYFYQKFNRNSYDNKGGKIVSSVHYGSRYNNAAWIGDQMIYGDGDGSFFSPLSGSMDVTAHEMTHGVTQETANLNYENQPGALNESFSDVFGYFNDTEDWDIGEDITVSQPALRSLSNPTKYGQPDNFKNYKNLPNTDAGDRGGVHTNSGIPNKAAYNTITKIGVNKAEQIYYRALTVYLTPSSTFKDAKAALIQSARDLYGSQDAESVEAAWNAVGL

SEQ ID NO: 71473 - protein, 300 aa, Bacillus amyloliquefaciens
AATTGTGTTLKGKTVSLNISSESGKYVLRDLSKPTGTQIITYDLQNREYNLPGTLVSSTTNQFTTSSQRAAVDAHYNLGKVYDYFYQKFNRNSYDNKGGKIVSSVHYGSRYNNAAWIGDQMIYGDGDGSFFSPLSGSMDVTAHEMTHGVTQETANLNYENQPGALNESFSDVFGYFNDTEDWDIGEDITVSQPALRSLSNPTKYGQPDNFKNYKNLPNTDAGDYGGVHTNSGIPNKAAYNTITKIGVNKAEQIYYRALTVYLTPSSTFKDAKAALIQSARDMYGSKDAASVEAAWNAVGL

SEQ ID NO: 71474 - protein, 300 aa, Bacillus amyloliquefaciens
AATTGTGTTLKGKTVSLNISSESGKYVLRDLSKPTGTQIITYDLQNREYNLPGTLVSSTTNQFTTSSQRAAVDAHYNLGKVYDYFYQKFNRNSYDNKGGKIVSSVHYGSAYNNAAWIGDQMIYGDGDGSFFSPLSGSMDVTAHEMTHGVTQETANLNYENQPGALNESFSDVFGYFNDTEDWDIGEDITVSQPALRSLSNPTKYGQPDNFKNYKNLPNTDAGDRGGVHTNSGIPNKAAYNTITKIGVNKAEQIYYRALTVYLTPSSTFKDAKAALIQSARDLYGSQDAASVEAAWNAVGL

SEQ ID NO: 71475 - protein, 300 aa, Bacillus amyloliquefaciens
AATTGTGTTLKGKTVSLNISSESGKYVLRDLSKPTGTQIITYDLQNREYNLPGTLVSSTTNQFTTSSQRAAVDAHYNLGKVYDYFYQKFNRNSYDNKGGVIVSSVHYGSRYNNAAWIGDQMIYGDGDGSFFSPLSGSMDVTAHEMTHGVTQETANLNYENQPGALNESFSDVFGYFNDTEDWDIGEDITVSQPALRSLSNPTKYGQPDNFKNYKNLPNTDAGDRGGVHTNSGIPNKAAYNTITKIGVNKAEQIYYRALTVYLTPSSTFKDAKAALIQSARDLYGSQDAASVEAAWNAVGL

SEQ ID NO: 71476 - protein, 300 aa, Bacillus amyloliquefaciens
AATTGTGTTLKGQTVSLNISSESGKYVLRDLSKPTGTQIITYDLQNREYNLPGTLVSSTTNQFTTSSQRAAVDAHYNLGKVYDYFYQKFNRNSYDNKGGKIVSSVHYGSRYNNAAWIGDQMIYGDGDGSFFSPLSGSMDVTAHEMTHGVTQETANLNYENQPGALNESFSDVFGYFNDTEDWDIGEDITVSQPALRSLSNPTKYGQPDNFKNYKNLPNTDAGDRGGVHTNSGIPNKAAYNTITKIGVNKAEQIYYRALTVYLTPSSTFKDAKAALIQSARDLYGSQDAASVEAAWNAVGL

SEQ ID NO: 71477 - protein, 300 aa, Bacillus amyloliquefaciens
AATTGTGTTLKGKTVSLNISSESGKYVLRDLSKPTGTQIITYDLQNREYNLPGTLVSSTTNQFTTSSQRAAVDAHYNLGKVYDYFYQKFNRNSYDNKGGKIVSSVHYGSRYNNAAWIGDQMIYGDGDGSFFSPLSWSMDVTAHEMTHGVTQETANLNYENQPGALNESFSDVFGYFNDTEDWDIGEDITVSQPALRSLSNPTKYGQPDNFKNYKNLPNTDAGDRGGVHTNSGIPNKAAYNTITKIGVNKAEQIYYRALTVYLTPSSTFKDAKAALIQSARDLYGSQDAASVEAAWNAVGL

SEQ ID NO: 71478 - protein, 300 aa, Bacillus amyloliquefaciens
AATTGTGTTLKGKTVSLNISSEWWKYVLRDLSKPTGTQIITYDLQNREYNLPGTLVSSTTNQFTTSSQRAAVDAHYNLGKVYDYFYQKFNRNSYDNKGGKIVSSVHYGSRYNNAAWIGDQMIYGDGDGSFFSPLSGSMDVTAHEMTHGVTQETANLNYENQPGALNESFSDVFGYFNDTEDWDIGEDITVSQPALRSLSNPTKYGQPDNFKNYKNLPNTDAGDYGGVHTNSGIPNKAAYNTITKIGVNKAEQIYYRALTVYLTPSSTFKDAKAALIQSARDLYGSQDAASVEAAWNAVGL

SEQ ID NO: 71479 - protein, 300 aa, Bacillus amyloliquefaciens
AATTGTGTTLKGKTVSLNISSESGKYVLRDLSKPTGTQIITYDLQNREYYLPGLLVSSTTNQFTTSSQRAAVDAHYNLGKVYDYFYQKFNRNSYDNKGGKIVSSVHYGSRYNNAAWIGDQMIYGDGDGSFFSPLSGSMDVTAHEMTHGVTQETANLNYENQPGALNESFSDVFGYFNDTEDWDIGEDITVSQPALRSLSNPTKYGQPDNFKNYKNLPNTDAGDYGGVHTNSGIPNKAAYNTITKIGVNKAEQIYYRALTVYLTPSSTFKDAKAALIQSARDLYGSQDAASVEAAWNAVGL

SEQ ID NO: 71480 - protein, 300 aa, Bacillus amyloliquefaciens
AATTGTGTTLKGKTVSLNISSESGKYVLRDLSKPTGTQIITYDLQNREYNLPGTLVSSTTNQFTTSSQRAAVDAHYNLGKVYDYFYQKFNRNSYDNKGGKIVSSVHYGSRYNNAAWIGDQMIYGDGDGSFFSPLSGSMDVTAHEMTHGVTQETANLNYENQPGALNESFSDVFGYFNDTEDWDIGEDITVSQPALRSLSNPTKYGQPDNFKNYKNLPNTDAGDRGGVHTNSGIPNKAAYNTITKIGVNKAEQIYYRALTHYLTPSSTFKDAKAALIQSARDLYGSQDAASVEAAWNAVGL

SEQ ID NO: 71481 - protein, 300 aa, Bacillus amyloliquefaciens
AATTGTGTTLKGKTVSLNISSESGKYVLRDLSKPTGTQIITYDLQQREYWLPGTLVSSTTNQFTTSSQRAAVDAHYNLGKVYDYFYQKFNRNSYDNKGGKIVSSVHYGSRYNNAAWIGDQMIYGDGDGSFFSPLSGSMDVTAHEMTHGVTQETANLNYENQPGALNESFSDVFGYFNDTEDWDIGEDITVSQPALRSLSNPTKYGQPDNFKNYKNLPNTDAGDYGGVHTNSGIPNKAAYNTITKIGVNKAEQIYYRALTVYLTPSSTFKDAKAALIQSARDLYGSQDAASVEAAWNAVGL

SEQ ID NO: 71482 - protein, 300 aa, Bacillus amyloliquefaciens
AATTGTGTTLKGKTVSLNISSESGKYVLRDLSKPTGTQIITYDLQQREYYLPGTLVSSTTNQFTTSSQRAAVDAHYNLGKVYDYFYQKFNRNSYDNKGGKIVSSVHYGSRYNNAAWIGDQMIYGDGDGSFFSPLSGSMDVTAHEMTHGVTQETANLNYENQPGALNESFSDVFGYFNDTEDWDIGEDITVSQPALRSLSNPTKYGQPDNFKNYKNLPNTDAGDYGGVHTNSGIPNKAAYNTITKIGVNKAEQIYYRALTVYLTPSSTFKDAKAALIQSARDLYGSQDAASVEAAWNAVGL

SEQ ID NO: 71483 - protein, 300 aa, Bacillus amyloliquefaciens
AATTGTGTTLKGKTVSLNISSESGKYVLRDLSKPTGTQIITYDLQNREYNLPGTLVSSTTNQFTTSSQRAAVDAHYNLGKVYDYFYQKFNRNSYDNKGGKIVSSVHYGSRYNNAAWIGDQMIYGDGDGSFFSPLSGSMDVTAHEMTHGVTQETANLNYENQPGALNESFSDVFGYFNDTEDWDIGEDITVSQPALRSLSNPTKYGQPDNFKNYKNLPNTDAGDRGGVHTNSGIPNKAAYNTITKIGVNKAEQIYYRALTYYLTPSSTFKDAKAALIQSARDLYGSQDAASVEAAWNAVGL

SEQ ID NO: 71484 - protein, 300 aa, Bacillus amyloliquefaciens
AATTGTGTTLKGKTVSLNISSESGKYVLRDLSKPTGTQIITYDLQNREYNLPGTLVSSTTNQFTTESQRAAVDAHYNLGKVYDYFYQKFNRNSYDNKGGKIVSSVHYGSRYNNAAWIGDQMIYGDGDGSFFSPLSGSMDVTAHEMTHGVTQETANLNYENQPGALNESFSDVFGYFNDTEDWDIGEDITVSQPALRSLSNPTKYGQPDNFKNYKNLPNTDAGDRGGVHTNSGIPNKAAYNTITKIGVNKAEQIYYRALTVYLTPSSTFKDAKAALIQSARDLYGSQDAASVEAAWNAVGL

SEQ ID NO: 71485 - protein, 300 aa, Bacillus amyloliquefaciens
AATTGTGTTLKGKTVSLNISSESGKYVLRDLSKPTGTQIITYDLQNREYNLPGTLVSSTTNQFTTSSQRAAVDAHYNLGKVYDYFYQKFNRNSYDNKGGKIVSSVHYGSRYNNAAWIGDQMIYGDGDGSFFSPLSGSMDVTAHEMTHGVTQETANLNYENQPGALNESFSDVFGYFNDTEDWDIGPDITVSQPALRSLSNPTKYGQPDNFKNYKNLPNTDAGDRGGVHTNSGIPNKAAYNTITKIGVNKAEQIYYRALTVYLTPSSTFKDAKAALIQSARDLYGSQDAASVEAAWNAVGL

SEQ ID NO: 71486 - protein, 300 aa, Bacillus amyloliquefaciens
AATTGTGTTLKGKTVSLNISSESGKYVLRDLSKPTGTQIITYDLQNREYNLPGTLVSSRTNQFTTQSQRAAVDAHYNLGKVYDYFYQKFNRNSYDNKGGKIVSSVHYGSRYNNAAWIGDQMIYGDGDGVFFSPLSGSMDVTAHEMTHGVTQETANLNYENQPGALNESFSDVFGYFNDTEDWDIGEDITVSQPALRSLSNPTKYGQPDNFKNYKNLPNTDAGDYGGVHTNSGIPNKAAYNTITKIGVNKAEQIYYRALTVYLTPSSTFKDAKAALIQSARDLYGSQDAASVEAAWNAVGL

SEQ ID NO: 71487 - protein, 300 aa, Bacillus amyloliquefaciens
AATTGTGTTLKGKTVSLNISSESGKYVLRDLSKPTGTQIITYDLQNREYNLPGTLVSSTTNQFTTSSQRAAVDAHYNLGKVYDYFYQKFNRNSYDNKGGKIVSSVHYGSRYNNAAWIGDQMIYGDGDGSFFSPLSGSMDVTAHEMTHGVTQETANLNYENQPGALNESFSDVFGYFNDTEDWDIGEDITVSQPALRSLSNPTKYGQPDNFKNYKNLPNTDAGDRGGVHTNSGIPNKAAYNTITAIGVNKAEQIYYRALTVYLTPSSTFKDAKAALIQSARDLYGSQDAASVEAAWNAVGL

SEQ ID NO: 71488 - protein, 300 aa, Bacillus amyloliquefaciens
AATTGTGTTLKGKTVSLNISSESGKYVLRDLSKPTGTQIITYDLQNREYNLPGTLVSSTTNQFTTSSQRAAVDAHYNLGKVYDYFYQKFNRNSYDNKGGKIVSSVHYGSRYNNAAWIGDQMIYGDGDGSFFSPLSGSMDVTAHEMTHGVTQETANLNYENQPGALNESFSDVFGYFNDTEDWDIGEDITVSQPALRSLSNPTKYGQPDNFKNYKNLPNTDAGDRGGVHTNSGIPNKAAYNTITKIGVNKAEQIYYRALTSYLTPSSTFKDAKAALIQSARDLYGSQDAASVEAAWNAVGL

SEQ ID NO: 71489 - protein, 300 aa, Bacillus amyloliquefaciens
AATTGTGTTLKGKTVSLNISSESGKYVLRDLSKPTGTQIITYDLQNREYNLPGTLVSSTTNQFTTSSQRAAVDAHYNLGKVYDYFYQKFNRNSYDNKGGKIVSSVHYGSRYNNAAWIGDQMIYGDGDGSFFSPLSGSMDVTAHEMTHGVTQETANLNYENQPGALNESFSDVFGYFNDTEDWDIGEDITVSQPALRSLSNPTKYGQPDNFKNYKNLPNTDAGDRGGVHTNSGIPNKAAYNTITKIGVNKAEQIYYRALTVYLTPSSTFKDAKCALIQSARDLYGSQDAASVEAAWNAVGL

SEQ ID NO: 71490 - protein, 300 aa, Bacillus amyloliquefaciens
AATTGTGTTLKGKTVSLNISSESGKYVLRDLSKPTGTQIITYDLQNREYNLPGTLVSSTTNQFTTSSQRAAVDAHYNLGKVYDYFYQKFNRNSYDNKGGKIVSSVHYGSRYNNAAWIGDQMIYGDGDGSFFSPLSGSMDVTAHEMTHGVTQETANLNYENQPGALNESFSDVFGYFNDTEDWDIGEDITVSQPALRSLSNPTKYGQPDNFKNYKNLPNTDAGDRGGVHTNSGIPNKAAYNTITKIGVNKAEQIYYRALTVYLQPSSTFKDAKAALIQSARDLYGSQDAASVEAAWNAVGL

SEQ ID NO: 71491 - protein, 300 aa, Bacillus amyloliquefaciens
AATTGTGTTLKGKTVSLNISSENGKYVLRDLSKPTGTQIITYDLQNREYNLPGTLVSSTTNQFTTSSQRAAVDAHYNLGKVYDYFYQKFNRNSYDNKGGKIVSSVHYGSRYNNAAWIGDQMIYGDGDGSFFSPLSGSMDVTAHEMTHGVTQETANLNYENQPGALNESFSDVFGYFNDTEDWDIGEDITVSQPALRSLSNPTKYGQPDNFKNYKNLPNTDAGDRGGVHTNSGIPNKAAYNTITKIGVNKAEQIYYRALTVYLTPSSTFKDAKAALIQSARDLYGSQDAASVEAAWNAVGL

SEQ ID NO: 71492 - protein, 300 aa, Bacillus amyloliquefaciens
AATTGTGTTLKGKTVSLNISSESGKYVLRDLSKPTGTQIITYDLQNRESNLPGTLVSSTTNQFTTSSQRAAVDAHYNLGKVYDYFYQKFNRNSYDNKGGKIVSSVHYGSRYNNAAWIGDQMIYGDGDGSFFSPLSGSMDVTAHEMTHGVTQETANLNYENQPGALNESFSDVFGYFNDTEDWDIGEDITVSQPALRSLSNPTKYGQPDNFKNYKNLPNTDAGDRGGVHTNSGIPNKAAYNTITKIGVNKAEQIYYRALTVYLTPSSTFKDAKAALIQSARDLYGSQDAASVEAAWNAVGL

SEQ ID NO: 71493 - protein, 300 aa, Bacillus amyloliquefaciens
AATTGTGTTLKGKTVSLNISSESGKYVLRDLSKPTGTQIITYDLQNREYNLPGTLVSSTTNQFTTSSQRAAVDAHYNLGKVYDYFYQKFNRNSYDNKGGKIVSSVHYGSRYNNAAWIGDQMIYGDGDGSFFSPLSGSMDVTAHEMTHGVTQETANLNYENQPGALNESFSDVFGYFNDTEDWDIGRDITVSQPALRSLSNPTKYGQPDNFKNYKNLPNTDAGDRGGVHTNSGIPNKAAYNTITKIGVNKAEQIYYRALTVYLTPSSTFKDAKAALIQSARDLYGSQDAASVEAAWNAVGL

SEQ ID NO: 71494 - protein, 300 aa, Bacillus amyloliquefaciens
AATTGTGTTLKGKHVSLNISSESGKYVLRDLSKPTGTQIITYDLQNREYNLPGTLVSSTTNQFTTSSQRAAVDAHYNLGKVYDYFYQKFNRNSYDNKGGKIVSSVHYGSRYNNAAWIGDQMIYGDGDGSFFSPLSGSMDVTAHEMTHGVTQETANLNYENQPGALNESFSDVFGYFNDTEDWDIGEDITVSQPALRSLSNPTKYGQPDNFKNYKNLPNTDAGDRGGVHTNSGIPNKAAYNTITKIGVNKAEQIYYRALTVYLTPSSTFKDAKAALIQSARDLYGSQDAASVEAAWNAVGL

SEQ ID NO: 71495 - protein, 300 aa, Bacillus amyloliquefaciens
AATTGTGTTLKGKTVSLNISSESGKYVLRDLSKPTGTQIITYDLQNREYNLPGTLVSSTTNQFTTSSQRAAVDAHYNLGKVYDYFYQKFNRNSYDNKGGKIVSSVHYGSRYNNAAWIGDQMIYGDGDGSFFSPLSGSMDVTAHEMTHGVTQETANLNYENQPGALNESFSDVFGYFNQTEDWDIGEDITVSQPALRSLSNPTKYGQPDNFKNYKNLPNTDAGDRGGVHTNSGIPNKAAYNTITKIGVNKAEQIYYRALTVYLTPSSTFKDAKAALIQSARDLYGSQDAASVEAAWNAVGL

SEQ ID NO: 71496 - protein, 300 aa, Bacillus amyloliquefaciens
AATTGTGTTLKGKTVSLNISSESGKYVLRDLSKPTGTQIITYDLQNREYNLPGTLVSSATNQFTTSSQRAAVDAHYNLGKVYDYFYQKFNRNSYDNKGGKIVSSVHYGSRYNNAAWIGDQMIYGDGDGSFFSPLSGSMDVTAHEMTHGVTQETANLNYENQPGALNESFSDVFGYFNDTEDWDIGEDITVSQPALRSLSNPTKYGQPDNFKNYKNLPNTDAGDRGGVHTNSGIPNKAAYNTITKIGVNKAEQIYYRALTVYLTPSSTFKDAKAALIQSARDLYGSQDAASVEAAWNAVGL

SEQ ID NO: 71497 - protein, 300 aa, Bacillus amyloliquefaciens
AATTGTGTTLKGKTVSLNISSESGKYVLRDLSKPTGTQIITYDLQNREYNLPGTLVSSTTNQFTTSSQRAAVDAHYNLGKVYDYFYQKFNRNSYDNKGGKIVSSVHYGSRYNNAAWIGDQMIYGDGDGSFFSPLSGSMDVTAHEMTHGVTQHTANLNYENQPGALNESFSDVFGYFNDPEDWDIGEDITVSQPALRSLSNPTKYGQPDNFKNYKNLPNTDAGDYGGVHTNSGIPNKAAYNTITKIGVNKAEQIYYRALTVYLTPSSTFKDAKAALIQSARDLYGSQDAASVEAAWNAVGL

SEQ ID NO: 71498 - protein, 300 aa, Bacillus amyloliquefaciens
AATTGTGTTLKGKTVSLNISSESGKYVLRDLSKPTGTQIITYDLQNREYNLPGTLVSSTTNQFTTSSQRAAVDAHYNLGKVYDYFYQKFNRNSYDNKGGKIVSSVHYGSRYNNAAWIGDQMIYGDGDGSVFSPLSGSMDVTAHEMTHGVTQWTANLNYENQPGALNESFSDVFGYFNDPEDWDIGEDITVSQPALRSLSNPTKYGQPDNFKNYKNLPNTDAGDYGGVHTNSGIPNKAAYNTITKIGVNKAEQIYYRALTVYLTPSSTFKDAKAALIQSARDLYGSQDAASVEAAWNAVGL

SEQ ID NO: 71499 - protein, 300 aa, Bacillus amyloliquefaciens
AATTGTGTTLKGKTVSLNISSESGKYVLRDLSKPTGTQIITYDLQNREYNLPGTLVSSTTNQFTTSSQRAAVDAHYNLGKVYDYFYQKFNRNSYDNKGGKIVSSVHYGSRYNNAAWIGDQMIYGDGDGSFFSPLSGSMDVTAHEMTHGVTQETANLNYENQPGALNESFSDVFGYFNDTEDWDIGEDITVSQPALRSLSNPTKYGQPDNFKNYKNLPNTDAGDRGGVHTNSGIPNKAAYNTITKIGVNKAEQIYYRALTVYLTPSSTFWDAKAALIQSARDLYGSQDAASVEAAWNAVGL

SEQ ID NO: 71500 - protein, 300 aa, Bacillus amyloliquefaciens
AATTGTGTTLKGKTVSLNISSESGKYVLRDLSKPTGTQIITYDLQNREYNLPGTLVSSTTNQFTTSSQRAAVDAHYNLGKVYDYFYQKFNRNSYDNKGGKIVSSVHYGSRYNNAAWIGDQMIYGDGDGSFFSPLSGSMDVTAHEMTHGVTQETANLNYENQPGALNESFSDVFGYFNDTEDWDIGEDITVSQPALRSLSNPTKYGQPDNFKNYKNLPNTDAGDRGGVHTNSGIPNKAAYNTITCIGVNKAEQIYYRALTVYLTPSSTFKDAKAALIQSARDLYGSQDAASVEAAWNAVGL

SEQ ID NO: 71501 - protein, 300 aa, Bacillus amyloliquefaciens
AATTGTGTTLKGKTVSLNISSESGKYVLRDLSKPTGTQIITYDLQNREYNLPGTLVSSRTNQFTTQSQRAAVDAHYNLGKVYDYFYQKFNRNSYDNKGGKIVSSVHYGSRYNNAAWIGDQMIYGDGDGQFFSPLSGSMDVTAHEMTHGVTQETANLNYENQPGALNESFSDVFGYFNDTEDWDIGEDITVSQPALRSLSNPTKYGQPDNFKNYKNLPNTDAGDYGGVHTNSGIPNKAAYNTITKIGVNKAEQIYYRALTVYLTPSSTFKDAKAALIQSARDLYGSQDAASVEAAWNAVGL

SEQ ID NO: 71502 - protein, 300 aa, Bacillus amyloliquefaciens
AATTGTGTTLKGKTVSLNISSESGKYVLRDLSKPTGTQIITYDLQNREYNLPGTLVSSTTNQFTTSSQRAAVDAHYNLGKVYDYFYQKFNRNSYDNKGGKIVSSVHYGSRYNNAAWIGDQMIYGDGDGSFFSPLSGSMDVTAHEMTHGVTQETANLNYENQPGALNESFSDVFGYFNDTEDWDIGEDITVSQPALRSLSNPTKYGQPDNFKNYKNLPNTDAGDRGGVHTNSGIPNKAAYNTITKIGVNKAEQIYYRALTKYLTPSSTFKDAKAALIQSARDLYGSQDAASVEAAWNAVGL

SEQ ID NO: 71503 - protein, 300 aa, Bacillus amyloliquefaciens
AATTGTGTTLKGKTVSLNISSESGKYVLRDLSKPTGTQIITYDLQNREYNLPGTLVSSTTNQFTTSSQRAAVDAHYNLGKVYDYFYQKFNRNSYDNKGGKIVSSVHYGSRYNNAAWIGDQMIYGDGDCSFFSPLSGSMDVTAHEMTHGVTQETANLNYENQPGALNESFSDVFGYFNDTEDWDIGEDITVSQPALRSLSNPTKYGQPDNFKNYKNLPNTDAGDRGGVHTNSGIPNKAAYNTITKIGVNKAEQIYYRALTVYLTPSSTFKDAKAALIQSARDLYGSQDAASVEAAWNAVGL

SEQ ID NO: 71504 - protein, 300 aa, Bacillus amyloliquefaciens
AATTGTGTTLKGKTVSLNISSESGKYVLRDLSKPTGTQIITYDLQNREYNLPGTLVSSTTNQFTTSSQRAAVDAHYNLGKVYDYFYQKFNRNSYDNKGGKIVSSVHYGSRYNNAAWIGDQMIYGDGDGSFFSPLSGSMDVTAHEMTHGVTQETANLNYENQPGALNESFSDVFGYFNDTEDWDIGEDITVSQPALRSLSNPTKYGQPDNFKNYKNLPNTDAGDRGGVHTNSGIPNKAAYNTITKIGVNKAEQIYYRALTVYLTPSSTFKDAKAALIQSARDLYGSEDAASVEAAWNAVGL

SEQ ID NO: 71505 - protein, 300 aa, Bacillus amyloliquefaciens
AATTGTGTTLKGKTVSLNISSESGKYVLRDLSKPTGTQIITYDLQNREYNLPGTLVSSTTNQFTTSSQRAAVDAHYNLGKVYDYFYQKFNRNSYDNKGGKIVSSVHYGSRYNNAAWIGDQMIYGDGDGSFFSPLSGSMDVTAHEMTHGVTQETANLNYENQPGALNESFSDVFGYFNDTEDWDIGEDITVSQPALRSLSNPTKYGQPDNFKNYKNLPNTDAGDRGGVHTNSGIPNKAAYNTITKIGVNKAEQIYYRALTQYLTPSSTFKDAKAALIQSARDLYGSQDAASVEAAWNAVGL

SEQ ID NO: 71506 - protein, 300 aa, Bacillus amyloliquefaciens
AATTGTGTTLKGKTVSLNISSESGKYVLRDLSKPTGTQIITYDLQNREYNLPGTLVSSTTNQFTTSSQRAAVDAHYNLGKVYDYFYQKFNRNSYDNKGGKIVSSVHYGSRYNNAAWIGDQMIYGDGDGSFFSPLSGSMDVTAHEMTHGVTQETANLNYENQPGALNESFSDVFGYFNGTEDWDIGEDITVSQPALRSLSNPTKYGQPDNFKNYKNLPNTDAGDRGGVHTNSGIPNKAAYNTITKIGVNKAEQIYYRALTVYLTPSSTFKDAKAALIQSARDLYGSQDAASVEAAWNAVGL

SEQ ID NO: 71507 - protein, 300 aa, Bacillus amyloliquefaciens
AATTGTGTTLKGKTVSLNISSESGKYVLRDLSKPTGTQIITYDLQNREYNLPGTLVSSTTNQFTTSSQRAAVDAHYNLGKVYDYFYQKFNRNSYDNKGGKIVSSVHYGSRYNNAAWIGDQMIYGDGDGSFFSPLSGSMDVTAHEMTHGVTQETANLNYENQPGALNESFSDVFGYFNHTEDWDIGEDITVSQPALRSLSNPTKYGQPDNFKNYKNLPNTDAGDRGGVHTNSGIPNKAAYNTITKIGVNKAEQIYYRALTVYLTPSSTFKDAKAALIQSARDLYGSQDAASVEAAWNAVGL

SEQ ID NO: 71508 - protein, 300 aa, Bacillus amyloliquefaciens
AATTGTGTTLKGKTVSLNISSESGKYVLRDLSKPTGTQIITYDLQNREYNLPGTLVSSTTNQFTTSSQRAAVDAHYNLGKVYDYFYQKFNRNSYDNKGGKIVSSVHYGSRYNNAAWIGDQMIYGDGDGSFFSPLSGSMDVTAHEMTHGVTQETANLNYENQPGALNESFSDVFGYFNDTEDWDIGWDITVSQPALRSLSNPTKYGQPDNFKNYKNLPNTDAGDRGGVHTNSGIPNKAAYNTITKIGVNKAEQIYYRALTVYLTPSSTFKDAKAALIQSARDLYGSQDAASVEAAWNAVGL

SEQ ID NO: 71509 - protein, 300 aa, Bacillus amyloliquefaciens
AATTGTGTTLKGKTVSLNISSEWMKYVLRDLSKPTGTQIITYDLQNREYNLPGTLVSSTTNQFTTSSQRAAVDAHYNLGKVYDYFYQKFNRNSYDNKGGKIVSSVHYGSRYNNAAWIGDQMIYGDGDGSFFSPLSGSMDVTAHEMTHGVTQETANLNYENQPGALNESFSDVFGYFNDTEDWDIGEDITVSQPALRSLSNPTKYGQPDNFKNYKNLPNTDAGDYGGVHTNSGIPNKAAYNTITKIGVNKAEQIYYRALTVYLTPSSTFKDAKAALIQSARDLYGSQDAASVEAAWNAVGL

SEQ ID NO: 71510 - protein, 300 aa, Bacillus amyloliquefaciens
AATTGTGTTLKGKTVSLNISSESGKYVLRDLSKPTGTQIITYDLQNREYNLPGTLVSSTTNQFTTSSQRAAVDAHYNLGKVYDYFYQKFNRNSYDNKGGKIVSSVHYGSRYNNAAWIGDQMIYGDGDGSFFSPLSGSMDVTAHEMTHGVTQETANLNYENQPGALNESFSDVFGYFNDTEDWDIGEDITVSQPALRSLSNPTKYGQPDNFKNYKNLPNTDAGDRGGVHTNSGIPNKAAYNTITKIGVNKAEQIYYRALTVYLTPSSTFLDAKAALIQSARDLYGSQDAASVEAAWNAVGL

SEQ ID NO: 71511 - protein, 300 aa, Bacillus amyloliquefaciens
AATTGTGTTLKGKTVSLNISSESGKYVLRDLSKPTGTQIITYDLQNLEYNLPGTLVSSTTNQFTTSSQRAAVDAHYNLGKVYDYFYQKFNRNSYDNKGGKIVSSVHYGSRYNNAAWIGDQMIYGDGDGSFFSPLSGSMDVTAHEMTHGVTQETANLNYENQPGALNESFSDVFGYFNDTEDWDIGEDITVSQPALRSLSNPTKYGQPDNFKNYKNLPNTDAGDRGGVHTNSGIPNKAAYNTITKIGVNKAEQIYYRALTVYLTPSSTFKDAKAALIQSARDLYGSQDAASVEAAWNAVGL

SEQ ID NO: 71512 - protein, 300 aa, Bacillus amyloliquefaciens
AATTGTGTTLKGKTVSLNISSESGKYVLRDLSKPTGTQIITYDLQNREINLPGTLVSSTTNQFTTSSQRAAVDAHYNLGKVYDYFYQKFNRNSYDNKGGKIVSSVHYGSRYNNAAWIGDQMIYGDGDGSFFSPLSGSMDVTAHEMTHGVTQETANLNYENQPGALNESFSDVFGYFNDTEDWDIGEDITVSQPALRSLSNPTKYGQPDNFKNYKNLPNTDAGDRGGVHTNSGIPNKAAYNTITKIGVNKAEQIYYRALTVYLTPSSTFKDAKAALIQSARDLYGSQDAASVEAAWNAVGL

SEQ ID NO: 71513 - protein, 300 aa, Bacillus amyloliquefaciens
AATTGTGTTLKGKTVSLNISSESGKYVLRDLSKPTGTQIITYDLQNREYNLPGTLVSSTTNQFTTSSQRAAVDAHYNLGKVYDYFYQKFNRNSYDNKGGKIVSSVHYGSRYNNAAWIGDQMIYGDGDGSFFSPLSGSMDVTAHEMTHGVTQETANLNYENQPGALNESFSDVFGYFNDTEDWDIGEDITVSQPALRSLSNPTKYGQPDNFKNYKNLPNTDAGDRGGVHTNSGIPNKAAYNTIRKIGVNKAEQIYYRALTVYLTPSSTFKDAKAALIQSARDLYGSQDAASVEAAWNAVGL

SEQ ID NO: 71514 - protein, 300 aa, Bacillus amyloliquefaciens
AATTGTGTTLKGKTVSLNISSESGKYVLRDLSKPTGTQIITYDLQNREYNLPGMLVSSTTNQFTTSSQRAAVDAHYNLGKVYDYFYQKFNRNSYDNKGGKIVSSVHYGSRYNNAAWIGDQMIYGDGDGSFFSPLSGSMDVTAHEMTHGVTQETANLNYENQPGALNESFSDVFGYFNDTEDWDIGEDITVSQPALRSLSNPTKYGQPDNFKNYKNLPNTDAGDRGGVHTNSGIPNKAAYNTITKIGVNKAEQIYYRALTVYLTPSSTFKDAKAALIQSARDLYGSQDAASVEAAWNAVGL

SEQ ID NO: 71515 - protein, 300 aa, Bacillus amyloliquefaciens
AATTGTGTTLKGKTVSLNISSESGKYVLRDLSKPTGTQIITYDLQNREYNLPGTLVSSTTNQFTTSSQRAAVDAHYNLGKVYDYFYQKFNRNSYDNKGGKIVSSVHYGSRYNNAAWIGDQMIYGDGDGSFFSPLSGSMDVTAHEMTHGVTQETANLNYENQPGALNESFSDVFGYFNDTEDWDIGEDITVSQPALRSLSNPTKYGQPDNFKNYKNLPNTDAGDRGGVHTNSGIPNKAAYNTITKIGVNKAEQIYYRALTVYLTPSSTFKDAKAALIQSARDMYGSQDAASVEAAWNAVGL

SEQ ID NO: 71516 - protein, 300 aa, Bacillus amyloliquefaciens
AATTGTGTTLKGATVSLNISSESGKYVLRDLSKPTGTQIITYDLQNREYNLPGTLVSSTTNQFTTSSQRAAVDAHYNLGKVYDYFYQKFNRNSYDNKGGKIVSSVHYGSRYNNAAWIGDQMIYGDGDGSFFSPLSGSMDVTAHEMTHGVTQETANLNYENQPGALNESFSDVFGYFNDTEDWDIGEDITVSQPALRSLSNPTKYGQPDNFKNYKNLPNTDAGDRGGVHTNSGIPNKAAYNTITKIGVNKAEQIYYRALTVYLTPSSTFKDAKAALIQSARDLYGSQDAASVEAAWNAVGL

SEQ ID NO: 71517 - protein, 300 aa, Bacillus amyloliquefaciens
AATTGTGTTLKGKTVSLNISSESGKYVLRDLSKPTGTQIITYDLQNREYNLPGTLVSSTTNQFTTSSQRAAVDAHYNLGKVYDYFYQKFNRNSYDNKGGKIVSSVHYGSRYNNAAWIGDQMIYGDGDGSFFSPLSGSMDVTAHEMTHGVTQETANLNYENQPGALNESFSDVFGYFNYTEDWDIGEDITVSQPALRSLSNPTKYGQPDNFKNYKNLPNTDAGDRGGVHTNSGIPNKAAYNTITKIGVNKAEQIYYRALTVYLTPSSTFKDAKAALIQSARDLYGSQDAASVEAAWNAVGL

SEQ ID NO: 71518 - protein, 300 aa, Bacillus amyloliquefaciens
AATTGTGTTLKGKTVSLNISSESGKYVLRDLSKPTGTQIITYDLQNREYNLPGTLVSSTTNQFTTSSQRAAVDAHYNLGKVYDYFYQKFNRNSYDNKGGKIVSSVHYGSRYNNAAWIGDQMIYGDGDGSFFSPLSGSMDVTAHEMTHGVTQETANLNYENQPGALNESFSDVFGYFNDTEDWDIGEDITVSQPALRSLSNPTKYGQPDNFKNYKNLPNTDAGDRGGVHTNSGIPNKAAYNTITKIGVNKAEQIYYRALTVYLTPSSTFKDAKIALIQSARDLYGSQDAASVEAAWNAVGL

SEQ ID NO: 71519 - protein, 300 aa, Bacillus amyloliquefaciens
AATTGTGTTLKGKTVSLNISSESGKYVLRDLSKPTGTQIITYDLQNREYNLPGTLVSSTTNQFTTSSQRAAVDAHYNLGKVYDYFYQKFNRNSYDNKGGKIVSSVHYGSRYNNAAWIGDQMIYGDGDGSFFSPLSGSMDVTAHEITHGVTQETANLNYENQPGALNESFSDVFGYFNDTEDSDIGEDITVSQPALRSLSNPTKYGQPDNFKNYKNLPNTDAGDYGGVHTNSGIPNKAAYNTITKIGVNKAEQIYYRALTVYLTPSSTFKDAKAALIQSARDLYGSQDAASVEAAWNAVGL

SEQ ID NO: 71520 - protein, 300 aa, Bacillus amyloliquefaciens
AATTGTGTTLKGKTVSLNISSESGKYVLRDLSKPTGTQIITYDLQCREYNLPGTLVSSTTNQFTTSSQRAAVDAHYNLGKVYDYFYQKFNRNSYDNKGGKIVSSVHYGSRYNNAAWIGDQMIYGDGDGSFFSPLSGSMDVTAHEMTHGVTQETANLNYENQPGALNESFSDVFGYFNDTEDWDIGEDITVSQPALRSLSNPTKYGQPDNFKNYKNLPNTDAGDRGGVHTNSGIPNKAAYNTITKIGVNKAEQIYYRALTVYLTPSSTFKDAKAALIQSARDLYGSQDAASVEAAWNAVGL

SEQ ID NO: 71521 - protein, 300 aa, Bacillus amyloliquefaciens
AATTGTGTTLKGKTVSLNISSEYMKYVLRDLSKPTGTQIITYDLQNREYNLPGTLVSSTTNQFTTSSQRAAVDAHYNLGKVYDYFYQKFNRNSYDNKGGKIVSSVHYGSRYNNAAWIGDQMIYGDGDGSFFSPLSGSMDVTAHEMTHGVTQETANLNYENQPGALNESFSDVFGYFNDTEDWDIGEDITVSQPALRSLSNPTKYGQPDNFKNYKNLPNTDAGDYGGVHTNSGIPNKAAYNTITKIGVNKAEQIYYRALTVYLTPSSTFKDAKAALIQSARDLYGSQDAASVEAAWNAVGL

SEQ ID NO: 71522 - protein, 300 aa, Bacillus amyloliquefaciens
AATTGTGTTLKGKTVSLNISSESGKYVLRDLSKPTGTQIITYDLQNREYNLPGTLVSSTTNQFTTSSQRAAVDAHYNLGKVYDYFYQKFNRNSYDNKGGHIVSSVHYGSRYNNAAWIGDQMIYGDGDGSFFSPLSGSMDVTAHEMTHGVTQETANLNYENQPGALNESFSDVFGYFNDTEDWDIGEDITVSQPALRSLSNPTKYGQPDNFKNYKNLPNTDAGDRGGVHTNSGIPNKAAYNTITKIGVNKAEQIYYRALTVYLTPSSTFKDAKAALIQSARDLYGSQDAASVEAAWNAVGL

SEQ ID NO: 71523 - protein, 300 aa, Bacillus amyloliquefaciens
AATTGTGTTLKGKTVSLNISSESGKYVLRDLSKPTGTQIITYDLQNREYNLPGTLVSSTTNQFTTSSQRAAVDAHYNLGKVYDYFYQKFNRNSYDNKGGKIVSSVHYGSRYNNAAWIGDQMIYGDGDGSFFSPLSGSMDVTAHEMTHGVTQETANLNYENQPGALNESFSDVFGYFNDTEDWDIGEDITVSQPALRSLSNPTKYGQPDNFKNYKNLPNTDAGDRGGVHTNSGIPNKAAYNTITKIGVNKAEQIYYRALTVYLTPSSTFKDAKAALIQSARDLYGKQDAASVEAAWNAVGL

SEQ ID NO: 71524 - protein, 300 aa, Bacillus amyloliquefaciens
AATTGTGTTLKGKTVSLNISSESGKYVLRDLSKPTGTQIITYDLQNREYNLPGTLVSSTTNQFTTSSQRAAVDAHYNLGKVYDYFYQKFNRNSYDNKGGKIVSSVHYGSRYNNAAWIGDQMIYGDGDGSFFSPLSGSMDVTAHEMTHGVTQETANLNYENQPGALNESFSDVFGYFNDTEDWDIGEDITVSQPALRSLSNPTKYGQPDNFKNYKNLPNTDAGDRGGVHTNSGIPNKAAYNTITKIGVNKAEQIYYRALTVYLTPSSTFKDAKAALIQSARDHYGSQDAASVEAAWNAVGL

SEQ ID NO: 71525 - protein, 300 aa, Bacillus amyloliquefaciens
AATTGTGTTLKGKTVSLNISSESGKYVLRDLSKPTGTQIITYDLQNREYNLPGTLVSSTTNQFTTSSQRAAVDAHYNLGKVYDYFYQKFNRNSYDNKGGKIVSSVHYGSRYNNAAWIGDQMIYGDGDGSFFSPLSGSMDVTAHEMTHGVTQETANLNYENQPGALNESFSDVFGYFNDTEDWDIGEDITVSQPALRSLSNPTKYGQPDNFKNYKNLPNTDAGDRGGVHTNSGIPNKAAYNTITKIGVNKAEQIYYRALTVYLTPSSTFKDAKAALIQSARDLYGSQDACSVEAAWNAVGL

SEQ ID NO: 71526 - protein, 300 aa, Bacillus amyloliquefaciens
AATTGTGTTLKGKTVSLNISSESGKYVLRDLSKPTGTQIITYDLQNREYNLPGTLVSSRTNQFTTQSQRAAVDAHYNLGKVYDYFYQKFNRSSYDNKGGKIVSSVHYGSRYNNAAWIGDQMIYGDGDGIFFSPLSGSMDVTAHEMTHGVTQETANLNYENQPGALNESFSDVFGYFNDTEDWDIGEDITVSQPALRSLSNPTKYGQPDNFKNYKNLPNTDAGDYGGVHTNSGIPNKAAYNTITKIGVNKAEQIYYRALTVYLTPSSTFKDAKAALIQSARDLYGSQDAASVEAAWNAVGL

SEQ ID NO: 71527 - protein, 300 aa, Bacillus amyloliquefaciens
AATTGTGTTLKGKTVSLNISSESGKYVLRDLSKPTGTQIITYDLQNREYNLPGTLVSSTTNQFTTSSQRAAVDAHYNLGKVYDYFYQKFNRNSYDNKGGKIVSSVHYGSRYNNAAWIGDQMIYGDGDGSFFSPLSGSMDVTAHEMTHGVTQETANLNYENQPGALNESFSDVYGYFNDTEDWDIGEDITVSQPALRSLSNPTKYGQPDNFKNYKNLPNTDAGDYGGVHTNSGIPNKAAYNTITKIGVNKAEQIYYRALTVYLTPSSTFKDAKAALIQSARDMYGSQDAASVEAAWNAVGL

SEQ ID NO: 71528 - protein, 300 aa, Bacillus amyloliquefaciens
AATTGTGTTLKGKTVSLNISSESGKYVLRDLSKPTGTQIITYDLQNREYNLPGTLVSSTTNQFTTSSQRAAVDAHYNLGKVYDYFYQKFNRNSYDNKGGKIVSSVHYGSRYNNAAWIGDQMIYGDGDGSFFSPLSGSMDVTAHEMTHGVTQETANLNYENQPGALNESFSDVFGYFNDTEDWDIGEDITVSQPALRSLSNPTKYGQPDNFKNYKNLPNTDAGDRGGVHTNSGIPNKAAYNTITKIGVNKAEQIYYRALTVYLTPSSTFKDAKAALIQSARDLYGSQDAASVEAAWRAVGL

SEQ ID NO: 71529 - protein, 300 aa, Bacillus amyloliquefaciens
AATTGTGTTLKGKTVSLNISSESGKYVLRDLSKPTGTQIITYDLQNREYNLPGTLVSSTTNQFTTSSQRAAVDAHYNLGKVYDYFYQKFNRNSYDNKGGKIVSSVHYGSEYNNAAWIGDQMIYGDGDGSFFSPLSGSMDVTAHEMTHGVTQETANLNYENQPGALNESFSDVFGYFNDTEDWDIGEDITVSQPALRSLSNPTKYGQPDNFKNYKNLPNTDAGDRGGVHTNSGIPNKAAYNTITKIGVNKAEQIYYRALTVYLTPSSTFKDAKAALIQSARDLYGSQDAASVEAAWNAVGL

SEQ ID NO: 71530 - protein, 300 aa, Bacillus amyloliquefaciens
AATTGTGTTLKGKTVSLNISSESGKYVLRDLSKPTGTQIITYDLQNREYNLPGTLVSSTTNQFTTSSQRAAVDAHYNLGKVYDYFYQKFNRNSYDNKGGKIVSSVHYGSRYNNAAWIGDQMIYGDGDGSFFSPLSGSMDVTAHEMTHGVTQETANLNYENQPGALNESFSDVFGYFNDTEDWDIGEDITVSQPALRSLSNPTKYGQPDNFKNYKNLPNTDAGDRGGVHTNSGIPNKAAYNTITKIGVNKAEQIYYRALTVYLTPSSTFGDAKAALIQSARDLYGSQDAASVEAAWNAVGL

SEQ ID NO: 71531 - protein, 300 aa, Bacillus amyloliquefaciens
AATTGTGTTLKGKTVSLNISSESGKYVLRDLSKPTGTQIITYDLQNREYNLPGTLVSSTTNQFTTSSQRAAVDAHYNLGKVYDYFYQKFNRNSYDNKGGKIVSSVHYGSRYNNAAWIGDQMIYGDGDGSFFSPLSGSMDVTAHEMTHGVTQETANLNYENQPGALNESFSDVFGYFNDTEDWDIGEDITVSQPALRSLSNPTKYGQPDNFKNYKNLPNTDAGDRGGVHTNSGIPNKAAYNTICKIGVNKAEQIYYRALTVYLTPSSTFKDAKAALIQSARDLYGSQDAASVEAAWNAVGL

SEQ ID NO: 71532 - protein, 300 aa, Bacillus amyloliquefaciens
AATTGTGTTLKGKTVSLNISSESGKYVLRDLSKPTGTQIITYDLQNREYNLPGTLVSSTTNQFTTSSQRAAVDAHYNLGKVYDYFYQKFNRNSYDNKGGKIVSSVHYGSRYNNAAWIGDQMIYGDGDGSFFSPLSGSMDVTAHEMTHGVTQFTANLNYENQPGALNESFSDVFGYFNDPEDWDIGEDITVSQPALRSLSNPTKYGQPDNFKNYKNLPNTDAGDYGGVHTNSGIPNKAAYNTITKIGVNKAEQIYYRALTVYLTPSSTFKDAKAALIQSARDLYGSQDAASVEAAWNAVGL

SEQ ID NO: 71533 - protein, 300 aa, Bacillus amyloliquefaciens
AATTGTGTTLKGKTVSLNISSESGKYVLRDLSKPTGTQIITYDLQNREYNLPGKLVSSTTNQFTTSSQRAAVDAHYNLGKVYDYFYQKFNRNSYDNKGGKIVSSVHYGSRYNNAAWIGDQMIYGDGDGSFFSPLSGSMDVTAHEMTHGVTQETANLNYENQPGALNESFSDVFGYFNDTEDWDIGEDITVSKPALRSLSNPTKYGQPDNFKNYKNLPNTDAGDYGGVHTNSGIPNKAAYNTITKIGVNKAEQIYYRALTVYLTPSSTFKDAKAALIQSARDLYGSQDAASVEAAWNAVGL

SEQ ID NO: 71534 - protein, 300 aa, Bacillus amyloliquefaciens
AATTGTGTTLKGKTVSLNISSESGKYVLRDLSKPTGTQIITYDLQNREYNLPGTLVSSTTNQFTTSSQRAAVDAHYNLGKVYDYFYQKFNRNSYDNKGGKIVSSVHYGSRYNNAAWIGDQMIYGDGDGSFFSPLSGSMDVTAHEMTHGVTQETANLNYENQPGALNESFSDVFGYFNDTEDWDIGEDITVSQPALRSLSNPTKYGQPDNFKNYKNLPNTDAGDRGGVHTNSGIPNKAAYNTITKIGVNKAEQIYYRALTVYLTPVSTFKDAKAALIQSARDLYGSQDAASVEAAWNAVGL

SEQ ID NO: 71535 - protein, 300 aa, Bacillus amyloliquefaciens
AATTGTGTTLKGKTVSLNISSESGKYVLRDLSKPTGTQIITYDLDNREYNLPGTLVSSTTNQFTTSSQRAAVDAHYNLGKVYDYFYQKFNRNSYDNKGGKIVSSVHYGSRYNNAAWIGDQMIYGDGDGSFFSPLSGSMDVTAHEMTHGVTQETANLNYENQPGALNESFSDVFGYFNDTEDWDIGEDITVSQPALRSLSNPTKYGQPDNFKNYKNLPNTDAGDRGGVHTNSGIPNKAAYNTITKIGVNKAEQIYYRALTVYLTPSSTFKDAKAALIQSARDLYGSQDAASVEAAWNAVGL

SEQ ID NO: 71536 - protein, 300 aa, Bacillus amyloliquefaciens
AATTGTGTTLKGKTVSLNISSESGKYVLRDLSKPTGTQIITYDLQNREYNLPGTLVSSTTNQFTTSSQRAAVDAHYNLGKVYDYFYQKFNRNSYDNKGGKIVSSVHYGSRYNNAAWIGDQMIYGDGDGSFFSPLSGSMDVTAHEMTHGVTQETANLNYENQPGALNESFSDVFGYFNDTEDWDIGEDITVSQPALRSLSNPTKYGQPDNFKNYKNLPNTDAGDRGGVHTNSGIPNKAAYNTITKIGVNKAEQIYYRALTVYLTPSSTFKDAKAALIQSAEDLYGSQDAASVEAAWNAVGL

SEQ ID NO: 71537 - protein, 300 aa, Bacillus amyloliquefaciens
AATTGTGTTLKGKTVSLNISSESGKYVLRDLSKPTGTQIITYDLQNREYNLPGTLVSSTTNQFTTSSQRAAVDAHYNLGKVYDYFYQKFNRNSYDNKGGKIVSSVHYGSRYNNAAWIGDQMIYGDGDGSFFSPLSGSMDVTAHEMTHGVTQETANLNYENQPGALNESFSDVFGYFNDTEDWDIGGDITVSQPALRSLSNPTKYGQPDNFKNYKNLPNTDAGDRGGVHTNSGIPNKAAYNTITKIGVNKAEQIYYRALTVYLTPSSTFKDAKAALIQSARDLYGSQDAASVEAAWNAVGL

SEQ ID NO: 71538 - protein, 300 aa, Bacillus amyloliquefaciens
AATTGTGTTLKGKTVSLNISSESGKYVLRDLSKPTGTQIITYDLQNREYNLPGTLVSSTTNQFTTSSQRAAVDAHYNLGKVYDYFYSKFNRNSYDNKGGKIVSSVHYGSRYNNAAWIGDQMIYGDGDGSFFSPLSGSMDVTAHEMTHGVTQETANLNYENQPGALNESFSDVFGYFNDTEDWDIGEDITVSQPALRSLSNPTKYGQPDNFKNYKNLPNTDAGDRGGVHTNSGIPNKAAYNTITKIGVNKAEQIYYRALTVYLTPSSTFKDAKAALIQSARDLYGSQDAASVEAAWNAVGL

SEQ ID NO: 71539 - protein, 300 aa, Bacillus amyloliquefaciens
AATTGTGTTLKGKTVSLNISSESGKYVLRDLSKPTGTQIITYDLQNREYNLPGTLVSSTTNQFTTSSQRAAVDAHYNLGKVYDYFYQKFNRNSYDNKGGKIVSSVHYGSRYNNAAWIGDQMIYGDGDGSFFSPLSGSMDVTAHEMTHGVTQETANLNYENQPGALNESFSDVFGYFNDTEDWDIGEDITVSQPALRSLSNPTKYGQPDNFKNYKNLPNTDAGDRGGVHTNSGIPNKAAYNTITKIGVNKAEQIYYRALTVYLHPSSTFKDAKAALIQSARDLYGSQDAASVEAAWNAVGL

SEQ ID NO: 71540 - protein, 300 aa, Bacillus amyloliquefaciens
AATTGTGTTLKGKTVSLNISSESGKYVLRDLSKPTGTQIITYDLQNREYNLPGTLVSSTTNQFTTSSQRAAVDAHYNLGKVYDYFYQKFNRNSYDNKGGKIVSSVHYGSYYNNAAWIGDQMIYGDGDGSFFSPLSGSMDVTAHEMTHGVTQETANLNYENQPGALNESFSDVFGYFNDTEDWDIGEDITVSQPALRSLSNPTKYGQPDNFKNYKNLPNTDAGDRGGVHTNSGIPNKAAYNTITKIGVNKAEQIYYRALTVYLTPSSTFKDAKAALIQSARDLYGSQDAASVEAAWNAVGL

SEQ ID NO: 71541 - protein, 300 aa, Bacillus amyloliquefaciens
AATTGTGTTLKGKTVSLNISSESGKYVLRDLSKPTGTQIITYDLQNREYNLPGTLVSSTTNQFTTSSQRAAVDAHYNLGKVYDYFYQKFNRNSYDNKGGKIVSSVHYGSRYNNAAWIGDQMIYGDGDGSFFSPLSGSMDVTAHEMTHGVTQETANLNYENQPGALNESFSDVFGYFNDTEDWDIGEDITVSQPALRSLSNPTKYGQPDNFKNYKNLPNTDAGDYGGVHTNSGIPNKAAYNTITKIGVNKAEQIYYRALTVYLTPPSTFKDAKAALIQSARDFYGSQDAASVEAAWNAVGL

SEQ ID NO: 71542 - protein, 300 aa, Bacillus amyloliquefaciens
AATTGTGTTLKGKTVSLNISSESGKYVLRDLSKPTGTQIITYDLQNREYNLPGTLVSPTTNQFTTSSQRAAVDAHYNLGKVYDYFYQKFNRNSYDNKGGKIVSSVHYGSRYNNAAWIGDQMIYGDGDGSFFSPLSGSMDVTAHEMTHGVTQETANLNYENQPGALNESFSDVFGYFNDTEDWDIGEDITVSQPALRSLSNPTKYGQPDNFKNYKNLPNTDAGDRGGVHTNSGIPNKAAYNTITKIGVNKAEQIYYRALTVYLTPSSTFKDAKAALIQSARDLYGSQDAASVEAAWNAVGL

SEQ ID NO: 71543 - protein, 300 aa, Bacillus amyloliquefaciens
AATTGTGTTLKGKTVSLNISSESGKYVLRDLSKPTGTQIITYDLQNREYDLPGTLVSSTTNQFTTSSQRAAVDAHYNLGKVYDYFYQKFNRNSYDNKGGKIVSSVHYGSRYNNAAWIGDQMIYGDGDGSFFSPLSGSMDVTAHEMTHGVTQETANLNYENQPGALNESFSDVFGYFNDTEDWDIGEDITVSQPALRSLSNPTKYGQPDNFKNYKNLPNTDAGDRGGVHTNSGIPNKAAYNTITKIGVNKAEQIYYRALTVYLTPSSTFKDAKAALIQSARDLYGSQDAASVEAAWNAVGL

SEQ ID NO: 71544 - protein, 300 aa, Bacillus amyloliquefaciens
AATTGTGTTLKGKTVSLNISSESGKYVLRDLSKPTGTQIITYDLQNREYNLPGTLVSSTTNQFTTSSQRAAVDAHYNLGKVYDYFYQKFNRNSYDNKGGKIVSSVHYGSRYNNAAWIGDQMIYGDGDGSFFSPLSGSMDVTAHEMTHGVTQETANLNYENQPGALNESFSDVFGYFNDTEDWDIGEDITVSQPALRSLSNPTKYGQPDNFKNYKNLPNTDAGDRGGVHTNSGIPNKAAYNTITKIGVNKAEQIYYRALTVYLTPSSTFKDAKAALIQSARDLYGSQDAASVEAAWNKVGL

SEQ ID NO: 71545 - protein, 300 aa, Bacillus amyloliquefaciens
AATTGTGTTLKGKTVSLNISSESGKYVLRDLSKPTGTQIITYDLQNREYNLPGTLVSSTTNQFTTSSQRAAVDAHYNLGKVYDYFYQKFNRNSYDNKGGKIVSSVHYGSRYNNAAWIGDQMIYGDGDGSFFSPLSGSMDVTAHEMTHGVTQETANLNYENQPGALNESFSDVFGYFNDTEDWDIGEDITVSQPALRSLSNPTKYGQPDNFKNYKNLPNTDAGDYGGVHINSGIPNKAAYNTITKIGVNKAEQIYYRALTVYLTPSSTFKDAKAALIQSALDLYGSQDAASVEAAWNAVGL

SEQ ID NO: 71546 - protein, 300 aa, Bacillus amyloliquefaciens
AATLGTGTTLKGKTVSLNISSESWKYVLRDLSKPTGTQIITYDLQNREYNLPGTLVSSTTNQFTTSSQRAAVDAHYNLGKVYDYFYQKFNRNSYDNKGGKIVSSVHYGSRYNNAAWIGDQMIYGDGDGSFFSPLSGSMDVTAHEMTHGVTQETANLNYENQPGALNESFSDVFGYFNDTEDWDIGEDITVSQPALRSLSNPTKYGQPDNFKNYKNLPNTDAGDYGGVHTNSGIPNKAAYNTITKIGVNKAEQIYYRALTVYLTPSSTFKDAKAALIQSARDLYGSQDAASVEAAWNAVGL

SEQ ID NO: 71547 - protein, 300 aa, Bacillus amyloliquefaciens
AATTGTGTTLKGKTVSLNISSESGKYVLRDLSKPTGTQIITYDLQNREYNLPGTLVSSTTNQFTTSSQRAAVDAHYNLGKVYDYFYQKFNRNSYDNKGGKIVSSVHYGSRYNNAAWIGDQMIYGDGDGSFFSPLSGSMDVTAHEMTHGVTQETANLNYENQPGALNESFSDVFGYFNDTEDWDIGEDITVSQPALRSLENPTKYGQPDNFKNYKNLPNTDAGDRGGVHTNSGIPNKAAYNTITKIGVNKAEQIYYRALTVYLTPSSTFKDAKAALIQSARDLYGSQDAASVEAAWNAVGL

SEQ ID NO: 71548 - protein, 300 aa, Bacillus amyloliquefaciens
AATTGTGTTLKGKTVSLNISSESGKYVLRDLSKPTGTQIITYDLQNREYNLPGTLVSSTTNQFTTSSQRAAVDAHYNLGKVYDYFYQKFNRNSYDNKGGKIVSSVHYGSRYNNAAWIGDQMIYGDGDGSFFSPLSGSMDVTAHEMTHGVTQETANLNYENQPGALNESFSDVFGYFNDTEDWDIGEDITVSQPALRSLSNPTKYGQPDNFKNYKNSPNTDAGDRGGVHTNSGIPNKAAYNTITKIGVNKAEQIYYRALTVYLTPSSTFKDAKAALIQSARDLYGSQDAASVEAAWNAVGL

SEQ ID NO: 71549 - protein, 300 aa, Bacillus amyloliquefaciens
AATTGTGTTLKGKTVSLNISSESGKYVLRDLSKPTGTQIITYDLQNREYNLPGTLVSSTTNQFTTSSQRAAVDAHYNLGKVYDYFYQKFNRNSYDNKGGKIVSSVHYGSRYNNAAWIGDQMIYGDGDGSFFSPLSGSMDVTAHEMTHGVTQETANLNYENQPGALNESFSDVFGYFNDTEDWDIGEDITVSQPALRSLSNPTKYGQPDNFKNYKNLPNTDAGDRGGVHTNSGIPNKAAYNTITKIGVNKAEQIYYRALTVYLVPSSTFKDAKAALIQSARDLYGSQDAASVEAAWNAVGL

SEQ ID NO: 71550 - protein, 300 aa, Bacillus amyloliquefaciens
AATTGTGTTLKGKTVSLNISSESGKYVLRDLSKPTGTQIITYDLQNREYNLPGTLVSSTTNQFTTSSQRAAVDAHYNLGKVYDYFYQKFNRNSYDNKGGKIVSSVHYGSRYNNAAWIGDQMIYGDGDGSFFSPLSGSMDVTAHEMTHGVTQETANLNYENQPGALNESFSDVFGYFNDTEDWDIGEDITVSQPALRSLSNPTKYGQPDNFKNYKNLPNTDAGDRGGVHTNSGIPNKAAYNTITEIGVNKAEQIYYRALTVYLTPSSTFKDAKAALIQSARDLYGSQDAASVEAAWNAVGL

SEQ ID NO: 71551 - protein, 300 aa, Bacillus amyloliquefaciens
AATTGTGTTLKGKTVSLNISSESGKYVLRDLSKPTGTQIITYDLQNREYNLPGTLVSSTTNQFTTSSQRAAVDAHYNLGKVYDYFYQKFNRNSYDNKGGNIVSSVHYGSRYNNAAWIGDQMIYGDGDGSFFSPLSGSMDVTAHEMTHGVTQETANLNYENQPGALNESFSDVFGYFNDTEDWDIGEDITVSQPALRSLSNPTKYGQPDNFKNYKNLPNTDAGDRGGVHTNSGIPNKAAYNTITKIGVNKAEQIYYRALTVYLTPSSTFKDAKAALIQSARDLYGSQDAASVEAAWNAVGL

SEQ ID NO: 71552 - protein, 300 aa, Bacillus amyloliquefaciens
AATSGTGTTLKGKTVSLNISSESWKYVLRDLSKPTGTQIITYDLQNREYNLPGTLVSSTTNQFTTSSQRAAVDAHYNLGKVYDYFYQKFNRNSYDNKGGKIVSSVHYGSRYNNAAWIGDQMIYGDGDGSFFSPLSGSMDVTAHEMTHGVTQETANLNYENQPGALNESFSDVFGYFNDTEDWDIGEDITVSQPALRSLSNPTKYGQPDNFKNYKNLPNTDAGDYGGVHTNSGIPNKAAYNTITKIGVNKAEQIYYRALTVYLTPSSTFKDAKAALIQSARDLYGSQDAASVEAAWNAVGL

SEQ ID NO: 71553 - protein, 300 aa, Bacillus amyloliquefaciens
AATTGTGTTLKGKTVSLNISSESGKYVLRDLSKPTGTQIITYDLQNREYNLPGTLVSSTTNQFTTSSQRAAVDAHYNLGKVYDYFYQKFNRNSYDNKGGKIVSSVHYGSRYNNAAWIGDQMIYGDGDGSFFSPLSGSMDVTAHEMTHGVTQETANLNYENQPGALNESFSDVFGYFNDTEDWDIGEDITVSQPALRSLSNPTKYGQPDNFKNYKNLPNTDAGDRGGVHTNSGIPNKAAYNTITKIGVNKAEQIYYRALTVYLTPSSTFKDAKAALIQSACDLYGSQDAASVEAAWNAVGL

SEQ ID NO: 71554 - protein, 300 aa, Bacillus amyloliquefaciens
AATTGTGTTLKGKTVSLNISSESGKYVLRDLSKPTGTQIITYDLQNREYNLPGTLVSSTTNQFTTSSQRAAVDAHYNLGKVYDYFYQKFNRNSYDNKGGKIVSSVHYGSRYNNAAWIGDQMIYGDGDGSFFSPLSGSMDVTAHEMTHGVTQETANLNYENQPGALNESFSDVFGYFNDTEDWDIGEDITVSQPALRSLSNPTKYGQPDNFKNYKNLPNTDAGDRGGVHTNSGIPNKAAYNTITTIGVNKAEQIYYRALTVYLTPSSTFKDAKAALIQSARDLYGSQDAASVEAAWNAVGL

SEQ ID NO: 71555 - protein, 300 aa, Bacillus amyloliquefaciens
AATTGTGTTLKGKTVSLNISSESGKYVLRDLSKPTGTQIITYDLQNREYNLPGTLVSSTTNQFTTSSQRAAVDAHYNLGKVYDYFYQKFNRNSYDNKGGKIVSSVHYGSRYNNAAWIGDQMIYGDGDGSFFSPLSGSMDVTAHEMTHGVTQETANLNYENQPGALNESFSDVFGYFNDTEDWDIGEDITVSQPALRSLSNPTKYGQPDNFKNYKNLPNTDAGDRGGVHTNSGIPNKAAYNTITKIGVNKAEQIYYRALTVYLTPNSTFKDAKAALIQSARDLYGSQDAASVEAAWNAVGL

SEQ ID NO: 71556 - protein, 300 aa, Bacillus amyloliquefaciens
AATTGTGTTLKGKTVSLNISSESGKYVLRDLSKPTGTQIITYDLQNREYNLPGTLVSSTTNQFTTSSQRAAVDAHYNLGKVYDYFYQKFNRNSYDNKGGKIVSSVHYGSRYNNAAWIGDQMIYGDGDGSFFSPLSGSMDVTAHEMTHGVTQETANLNYENQPGALNESFSDVFGYFNDTEDWDIGEDITVSQPALRSLSNPTKYGQPDNFKNYKNLPNTDAGDRGGVHTNSGIPNKAAYNTITYIGVNKAEQIYYRALTVYLTPSSTFKDAKAALIQSARDLYGSQDAASVEAAWNAVGL

SEQ ID NO: 71557 - protein, 300 aa, Bacillus amyloliquefaciens
AATTGTGTTLKGKTVSLNISSESGKYVLRDLSKPTGTQIITYDLQNREYNLPGTLVSSTTNQFTTSSQRAAVDAHYNLGKVYDYFYQKFNRNSYDNKGGKIVSSVHYGSRYNNAAWIGDQMIYGDGDGSFFSPLSGSMDVTAHEMTHGVTQETANLNYENQPGALNESFSDVFGYFNDTEDWDIGEDITVSQPALRSLSNPTKYGQPDNFKNYKNLPNTDAGDRGGVHTNSGIPNKAAYNTITKIGVNKAEQIYYRALTVYLTPSSTFKDAKAALIQSAADLYGSQDAASVEAAWNAVGL

SEQ ID NO: 71558 - protein, 300 aa, Bacillus amyloliquefaciens
AATTGTGTTLKGKTVSLNISSESGKYVLRDLSKPTGTQIITYDLQNREYNLPGTLVSSTTNQFTTSSQRAAVDAHYNLGKVYDYFYQKFNRNSYDNKGGKIVSSVHYGSRYNNAAWIGDQMIYGDGDGSFFSPLSGSMDVTAHEMTHGVTQETANLNYENQPGALNESFSDVFGYFNDTEDWDIGEDITVSQPALRSLSNPTKYGQPDNFKNYKNLPNTDAGDRGGVHTNSGIPNKAAYNTITKIGVNKAEQIYYRALTVYLTPSSTFKDAKAALIQSARDLYGSKDAASVEAAWNAVGL

SEQ ID NO: 71559 - protein, 300 aa, Bacillus amyloliquefaciens
AATTGTGTTLKGKTVSLNISSESGKYVLRDLSKPTGTQIITYDLQNREYNLPGTLVSSTTNQFTTSSQRAAVDAHYNLGKVYDYFYQKFCRNSYDNKGGKIVSSVHYGSRYNNAAWIGDQMIYGDGDGSFFSPLSGSMDVTAHEMTHGVTQETANLNYENQPGALNESFSDVFGYFNDTEDWDIGEDITVSQPALRSLSNPTKYGQPDNFKNYKNLPNTDAGDRGGVHTNSGIPNKAAYNTITKIGVNKAEQIYYRALTVYLTPSSTFKDAKAALIQSARDLYGSQDAASVEAAWNAVGL

SEQ ID NO: 71560 - protein, 300 aa, Bacillus amyloliquefaciens
AATTGTGTTLKGKTVSLNISSESGKYVLRDLSKPTGTQIITYDLQNREYNLPGTLVSSTTNQFTTSSQRAAVDAHYNLGKVYDYFYQKFNRNSYDNKGGKIVSSVHYGSRYNNAAWIGDQMIYGDGDGSFFSPLSGSMDVTAHEMTHGVTQETANLNYENQPGALNESFSDVFGYFNDTEDWDIGEDITVSQPALRSLSNPTKYGQPDNFKNYKNLPNTDAGDRGGVHTNSGIPNKAAYNTITKIGVNKAEQIYYRALTVYLTPSSTFKDAKAALIQSARDLYGSQDARSVEAAWNAVGL

SEQ ID NO: 71561 - protein, 300 aa, Bacillus amyloliquefaciens
AATTGTGTTLKGKTVSLNISSEYYKYVLRDLSKPTGTQIITYDLQNREYNLPGTLVSSTTNQFTTSSQRAAVDAHYNLGKVYDYFYQKFNRNSYDNKGGKIVSSVHYGSRYNNAAWIGDQMIYGDGDGSFFSPLSGSMDVTAHEMTHGVTQETANLNYENQPGALNESFSDVFGYFNDTEDWDIGEDITVSQPALRSLSNPTKYGQPDNFKNYKNLPNTDAGDYGGVHTNSGIPNKAAYNTITKIGVNKAEQIYYRALTVYLTPSSTFKDAKAALIQSARDLYGSQDAASVEAAWNAVGL

SEQ ID NO: 71562 - protein, 300 aa, Bacillus amyloliquefaciens
AATTGTGTTLKGKTVSLNISSESGKYVLRDLSKPTGTQIITYDLQNREYNLPGTLVSSTTNQFTTSSQRAAVDAHYNLGKVYDYFYQKFNRNSYDNKGGKIVSSVHYGSRYNNAAWIGDQMIYGDGDGSFFSPLSGSMDVTAHEMTHGVTQETANLNYENQPGALNESFSDVFGYFNMTEDWDIGEDITVSQPALRSLSNPTKYGQPDNFKNYKNLPNTDAGDRGGVHTNSGIPNKAAYNTITKIGVNKAEQIYYRALTVYLTPSSTFKDAKAALIQSARDLYGSQDAASVEAAWNAVGL

SEQ ID NO: 71563 - protein, 300 aa, Bacillus amyloliquefaciens
AATTGTGTTLKGKTVSLNISSESGKYVLRDLSKPTGTQIITYDLQNREYNLPGTLVSSWTNQFTTQSQRAAVDAHYNLGKVYDYFYQKFNRNSYDNKGGKIVSSVHYGSRYNNAAWIGDQMIYGDGDGVFFSPLSGSMDVTAHEMTHGVTQETANLNYENQPGALNESFSDVFGYFNDTEDWDIGEDITVSQPALRSLSNPTKYGQPDNFKNYKNLPNTDAGDYGGVHTNSGIPNKAAYNTITKIGVNKAEQIYYRALTVYLTPSSTFKDAKAALIQSARDLYGSQDAASVEAAWNAVGL

SEQ ID NO: 71564 - protein, 300 aa, Bacillus amyloliquefaciens
AATTGTGTTLKGKTVSLNISSESGKYVLRDLSKPTGTQIITYDLQNREYNLPGTLVSSTTNQFTTSSQRAAVDAHYNLGKVYDYFYQKFNRNSYDNKGGKIVSSVHYGSRYNNAAWIGDQMIYGDGDGSFFSPLSGSMDVTAHEMTHGVTQETANLNYENQPGALNESFSDVFGYFNDTEDWDIGEDITVSQPALRSLSNPTKYGQPDNFKNYKNLPNTDAGDYGGVHTNSGIPNKAAYNTITKIGVNKAEQIYYRALTVYLTPSSTFKDAKAPLIQSARDLYGSKDAASVEAAWNAVGL

SEQ ID NO: 71565 - protein, 300 aa, Bacillus amyloliquefaciens
AATKGTGTTLKGKTVSLNISSESGKYVLRDLSKPTGTQIITYDLQNREYNLPGTLVSSTTNQFTTSSQRAAVDAHYNLGKVYDYFYQKFNRNSYDNKGGKIVSSVHYGSRYNNAAWIGDQMIYGDGDGSFFSPLSGSMDVTAHEMTHGVTQETANLNYENQPGALNESFSDVFGYFNDTEDWDIGEDITVSQPALRSLSNPTKYGQPDNFKNYKNLPNTDAGDYGGVHTNSGIPNKAAYNTITKIGVNKAEQIYYRALTVYLTPSSTFKDAKAALIQSALDLYGSQDAASVEAAWNAVGL

SEQ ID NO: 71566 - protein, 300 aa, Bacillus amyloliquefaciens
AATTGTGTTLKGKTVSLNISSESGKYVLRDLSKPTGTQIITYDLQNREYYLPGTLVSSTTNQFTTSSQRAAVDAHYNLGKVYDYFYQKFNRNSYDNKGGKIVSSVHYGSRYNNAAWIGDQMIYGDGDGSFFSPLSGSMDVTAHEMTHGVTQETANLNYENQPGALNESFSDVFGYFNDTEDWDIGEDITVIQPALRSLSNPTKYGQPDNFKNYKNLPNTDAGDYGGVHTNSGIPNKAAYNTITKIGVNKAEQIYYRALTVYLTPSSTFKDAKAALIQSARDLYGSQDAASVEAAWNAVGL

SEQ ID NO: 71567 - protein, 300 aa, Bacillus amyloliquefaciens
AATTGTGTTLKGKTVSLNISSESGKYVLRDLSKPTGTQIITYDLQNEEYNLPGTLVSSTTNQFTTSSQRAAVDAHYNLGKVYDYFYQKFNRNSYDNKGGKIVSSVHYGSRYNNAAWIGDQMIYGDGDGSFFSPLSGSMDVTAHEMTHGVTQETANLNYENQPGALNESFSDVFGYFNDTEDWDIGEDITVSQPALRSLSNPTKYGQPDNFKNYKNLPNTDAGDRGGVHTNSGIPNKAAYNTITKIGVNKAEQIYYRALTVYLTPSSTFKDAKAALIQSARDLYGSQDAASVEAAWNAVGL

SEQ ID NO: 71568 - protein, 300 aa, Bacillus amyloliquefaciens
AATTGTGTTLKGKTVSLNISSESGKYVLRDLSKPTGTQIITYDLQNREYNLPGTLVSSTTNQFTTSSQRAAVDAHYNLGKVYDYFYQKFNRNSYDNKGGKIVSSVHYGSRYNNAAWIGDQMIYGDGDGSFFSPLSGSMDVTAHEMTHGVTQETANLNYENQPGALNESFSDVFGYFNDTEDWDIGQDITVSQPALRSLSNPTKYGQPDNFKNYKNLPNTDAGDRGGVHTNSGIPNKAAYNTITKIGVNKAEQIYYRALTVYLTPSSTFKDAKAALIQSARDLYGSQDAASVEAAWNAVGL

SEQ ID NO: 71569 - protein, 300 aa, Bacillus amyloliquefaciens
AATTGTGTTLKGKTVSLNISSESGKYVLRDLSKPTGTQIITYDLQNREYNLPGTLVSSTTNQFTTSSQRAAVDAHYNLGKVYDYFYQKFNRNSYDNKGGKIVSSVHYGSRYNNAAWIGDQMIYGDGDGSFFSPLSGSMDVTAHEMTHGVTQETANLNYENQPGALNESFSDVFGYFNDTEDWDIGCDITVSQPALRSLSNPTKYGQPDNFKNYKNLPNTDAGDRGGVHTNSGIPNKAAYNTITKIGVNKAEQIYYRALTVYLTPSSTFKDAKAALIQSARDLYGSQDAASVEAAWNAVGL

SEQ ID NO: 71570 - protein, 300 aa, Bacillus amyloliquefaciens
AATTGTGTTLKGKTVSLNISSESGKYVLRDLSKPTGTQIITYDLQNREYNLPGTLVSSTTNQFTTSSQRAAVDAHYNLGKVYDYFYQKFNRNSYDNKGGKIVSSVHYGSRYNNAAWIGDQMIYGDGDGSFFSPLSGSMDVTAHEMTHGVTQETANLNYENQPGALNESFSDVFGYFNDTEDWDIGEDITVSQPALRSLSNPTKYGQPDNFKNYKNLPNTDACDRGGVHTNSGIPNKAAYNTITKIGVNKAEQIYYRALTVYLTPSSTFKDAKAALIQSARDLYGSQDAASVEAAWNAVGL

SEQ ID NO: 71571 - protein, 300 aa, Bacillus amyloliquefaciens
AATTGTGTTLKGKTVSLNISSESGKYVLRDLSKPTGTQIITYDLQNREYNLPGTLVSSTTNQFTTSSQRAAVDAHYNLGKVYDYFYQKFNRNSYDNKGGKIVSSVHYGSRYNNAAWIGDQMIYGDGDGSFFSPLSGSMDVTAHEMTHGVTQETANLNYENQPGALNESFSDVFGYFNDTEDWDIGEDITVSQPALRSLSNPTKYGQPDNFKNYKNLPNTDAGDRGGVHTNSGIPNKAAYNTITKIGVNKAEQIYYRALTVFLTPSSTFKDAKAALIQSARDLYGSQDAASVEAAWNAVGL

SEQ ID NO: 71572 - protein, 300 aa, Bacillus amyloliquefaciens
AATTGTGTTLKGKTVSLNISSESGKYVLRDLSKPTGTQIITYDLQNREANLPGTLVSSTTNQFTTSSQRAAVDAHYNLGKVYDYFYQKFNRNSYDNKGGKIVSSVHYGSRYNNAAWIGDQMIYGDGDGSFFSPLSGSMDVTAHEMTHGVTQETANLNYENQPGALNESFSDVFGYFNDTEDWDIGEDITVSQPALRSLSNPTKYGQPDNFKNYKNLPNTDAGDRGGVHTNSGIPNKAAYNTITKIGVNKAEQIYYRALTVYLTPSSTFKDAKAALIQSARDLYGSQDAASVEAAWNAVGL

SEQ ID NO: 71573 - protein, 300 aa, Bacillus amyloliquefaciens
AATTGTGTTLKGKTVSLNISSESGKYVLRDLSKPTGTQIITYDLQNREYNLPGTLVSSTTNQFTTSSQRAAVDAHYNLGKVYDYFYQKFNRNSYDNKGGKIVSSVHYGSRYNNAAWIGDQMIYGDGDGSFFSPLSGSMDVTAHEMTHGVTQETANLNYENQPGALNESFSDVFGYFNDTEDWDIGEDITVSQPALRSLSNPTKYGQPDNFKNYKNLPNTDAGDYGGVHTNSGIPNKAAYNTITKIGVNKAEQIYYRALTVYLTPPSTFKDAKAALIQSARDMYGSQDAASVEAAWNAVGL

SEQ ID NO: 71574 - protein, 300 aa, Bacillus amyloliquefaciens
AATTGTGTTLKGKTVSLNISSESGKYVLRDLSKPTGTQIITYDLQNREYNLPGTLVSSTTNQFTTSSQRAAVDAHYNLGKVYDYFYQKFNRNSYDNKGGKIVSSVHYGSRYNNAAWIGDQMIYGDGDGSFFSPLSGSMDVTAHEMTHGVTQETANLNYENQPGALNESFSDVFGYFNRTEDWDIGEDITVSQPALRSLSNPTKYGQPDNFKNYKNLPNTDAGDRGGVHTNSGIPNKAAYNTITKIGVNKAEQIYYRALTVYLTPSSTFKDAKAALIQSARDLYGSQDAASVEAAWNAVGL

SEQ ID NO: 71575 - protein, 300 aa, Bacillus amyloliquefaciens
AATTGTGTTLKGKTVSLNISSESGKYVLRDLSKPTGTQIITYDLKNREYNLPGTLVSSTTNQFTTSSQRAAVDAHYNLGKVYDYFYQKFNRNSYDNKGGKIVSSVHYGSRYNNAAWIGDQMIYGDGDGSFFSPLSGSMDVTAHEMTHGVTQETANLNYENQPGALNESFSDVFGYFNDTEDWDIGEDITVSQPALRSLENPTKYGQPDNFKNYKNLPNTDAGDYGGVHTNSGIPNKAAYNTITKIGVNKAEQIYYRALTVYLTPSSTFKDAKAALIQSARDLYGSQDAASVEAAWNAVGL

SEQ ID NO: 71576 - protein, 300 aa, Bacillus amyloliquefaciens
AATTGTGTTLKGMTVSLNISSESGKYVLRDLSKPTGTQIITYDLQNREYNLPGTLVSSTTNQFTTSSQRAAVDAHYNLGKVYDYFYQKFNRNSYDNKGGKIVSSVHYGSRYNNAAWIGDQMIYGDGDGSFFSPLSGSMDVTAHEMTHGVTQETANLNYENQPGALNESFSDVFGYFNDTEDWDIGEDITVSQPALRSLSNPTKYGQPDNFKNYKNLPNTDAGDRGGVHTNSGIPNKAAYNTITKIGVNKAEQIYYRALTVYLTPSSTFKDAKAALIQSARDLYGSQDAASVEAAWNAVGL

SEQ ID NO: 71577 - protein, 300 aa, Bacillus amyloliquefaciens
AATTGTGTTLKGKTVSLNISSESGKYVLRDLSKPTGTQIITYDLQNREYNLPGHLVSSTTNQFTTSSQRAAVDAHYNLGKVYDYFYQKFNRNSYDNKGGKIVSSVHYGSRYNNAAWIGDQMIYGDGDGSFFSPLSGSMDVTAHEMTHGVTQETANLNYENQQGALNESFSDVFGYFNDTEDWDIGEDITVSQPALRSLSNPTKYGQPDNFKNYKNLPNTDAGDYGGVHTNSGIPNKAAYNTITKIGVNKAEQIYYRALTVYLTPSSTFKDAKAALIQSARDLYGSQDAASVEAAWNAVGL

SEQ ID NO: 71578 - protein, 300 aa, Bacillus amyloliquefaciens
AATTGTGTTLKGKTVSLNISSESGKYVLRDLSKPTGTQIITYDLQNREYNLPGTLVSSTTNQFTTSSQRAAVDAHYNLGKVYDYFYQKFNRNSYDNKGGKIVSSVHYGSRYNNAAWIGDQMIYGDGDGSFFSPLSGSMDVTAHEMTHGVTQETANLNYENQPGALNESFSDVFGYFNDTEDWDIGEDITVSQPALRSLSNPTKYGQPDNFKNYKNLPNTDAGDYGGVHTNSGIPNKAAYNTITKIGVNKAEQIYYRALTVYLHPSSTFKDAKAALIQSARDLYGWQDAASVEAAWNAVGL

SEQ ID NO: 71579 - protein, 300 aa, Bacillus amyloliquefaciens
AATTGTGTTLKGKTVSLNISSESGKYVLRDLSKPTGTQIITYDLPNREYNLPGTLVSSTTNQFTTSSQRAAVDAHYNLGKVYDYFYQKFNRNSYDNKGGKIVSSVHYGSRYNNAAWIGDQMIYGDGDGSFFSPLSGSMDVTAHEMTHGVTQETANLNYENQPGALNESFSDVFGYFNDTEDWDIGEDITVSQPALRSLSNPTKYGQPDNFKNYKNLPNTDAGDRGGVHTNSGIPNKAAYNTITKIGVNKAEQIYYRALTVYLTPSSTFKDAKAALIQSARDLYGSQDAASVEAAWNAVGL

SEQ ID NO: 71580 - protein, 300 aa, Bacillus amyloliquefaciens
AATTGTGTTLKGKTVSLNISSESGKYVLRDLSKPTGTQIITYDLQNREYNLPGTLVSSTTNQFTTSSQRAAVDAHYNLGKVYDYFYQKFNRNSYDNKGGKIVSSVHYGSRYNNAAWIGDQMIYGDGDGSFFSPLSGSMDVTAHEMTHGVTQETANLNYENQPGALNESFSDVFGYFNDTEDWDIGEDITVSQPALRSLSNPTKYGQPDNFKNYKNLPNTDAGDRGGVHTNSGIPNKAAYNTITKIGVNKAEQIYYRALTVYLTPWSTFKDAKAALIQSARDLYGSQDAASVEAAWNAVGL

SEQ ID NO: 71581 - protein, 300 aa, Bacillus amyloliquefaciens
AATTGTGTTLKGKTVSLNISSESGKYVLRDLSKPTGTQIITYDLQNREYNLPGTLVSSTTNQFTTSSQRAAVDAHYNLGKVYDYFYQKFNRNSYDNKGGKIVSSVHYGSRYNNAAWIGDQMIYGDGDGSFFSPLSGSMDVTAHEMTHGVTQETANLNYENQPGALNESFSDVFGYFNDTEDWDIGEDITVSQPALRSLSNPTKYGQPDNFKNYLNLPNTDAGDRGGVHTNSGIPNKAAYNTITKIGVNKAEQIYYRALTVYLTPSSTFKDAKAALIQSARDLYGSQDAASVEAAWNAVGL

SEQ ID NO: 71582 - protein, 300 aa, Bacillus amyloliquefaciens
AATTGTGTTLKGKTVSLNISSESGKYVLRDLSKPTGTQIITYDLQNREYNLPGTLVSSTTNQFTTSSQRAAVDAHYNLGKVYDYFYQKFNRNSYDNKGGKIVSSVHYGSRYNNAAWIGDQMIYGDGDGSFFSPLSGSMDVTAHEMTHGVTQETANLNYENQPGALNESFSDVFGYFNDTEDWDIGEDITVSQPALRSLSNPTKYGQPDNFKNYKNLPNTDAGDRGGVHTNSGIPNKAAYNTITKIGVNKAEQIYYRALTVYLTPKSTFKDAKAALIQSARDLYGSQDAASVEAAWNAVGL

SEQ ID NO: 71583 - protein, 300 aa, Bacillus amyloliquefaciens
AATTGTGTTLKGKTVSLNISSESGKYVLRDLSKPTGTQIITYDLQEREYNLPGTLVSSTTNQFTTSSQRAAVDAHYNLGKVYDYFYQKFNRNSYDNKGGKIVSSVHYGSRYNNAAWIGDQMIYGDGDGSFFSPLSGSMDVTAHEMTHGVTQETANLNYENQPGALNESFSDVFGYFNDTEDWDIGEDITVSQPALRSLSNPTKYGQPDNFKNYKNLPNTDAGDRGGVHTNSGIPNKAAYNTITKIGVNKAEQIYYRALTVYLTPSSTFKDAKAALIQSARDLYGSQDAASVEAAWNAVGL

SEQ ID NO: 71584 - protein, 300 aa, Bacillus amyloliquefaciens
AATTGTGTTLKGKTVSLNISSESGKYVLRDLSKPTGTQIITYDLQNREYNLPGTLVSSTTNQFTTSSQRAAVDAHYNLGKVYDYFYQKFNRNSYDNKGGKIVSSVHYGSRYNNAAWIGDQMIYGDGDGSFFSPLSGSMDVTAHEMTHGVTQETANLNYENQPGALNESFSDVFGYFNDTEDWDIGYDITVSQPALRSLSNPTKYGQPDNFKNYKNLPNTDAGDRGGVHTNSGIPNKAAYNTITKIGVNKAEQIYYRALTVYLTPSSTFKDAKAALIQSARDLYGSQDAASVEAAWNAVGL

SEQ ID NO: 71585 - protein, 300 aa, Bacillus amyloliquefaciens
AATTGTGTTLKGDTVSLNISSESGKYVLRDLSKPTGTQIITYDLQNREYNLPGTLVSSTTNQFTTSSQRAAVDAHYNLGKVYDYFYQKFNRNSYDNKGGKIVSSVHYGSRYNNAAWIGDQMIYGDGDGSFFSPLSGSMDVTAHEMTHGVTQETANLNYENQPGALNESFSDVFGYFNDTEDWDIGEDITVSQPALRSLSNPTKYGQPDNFKNYKNLPNTDAGDRGGVHTNSGIPNKAAYNTITKIGVNKAEQIYYRALTVYLTPSSTFKDAKAALIQSARDLYGSQDAASVEAAWNAVGL

SEQ ID NO: 71586 - protein, 300 aa, Bacillus amyloliquefaciens
AATTGTGTTLKGKTVSLNISSESGKYVLRDLSKPTGTQIITYDLQNREYNLPGTLVSSTTNQFTTSSQRAAVDAHYNLGKVYDYFYQKFNRNSYDNKGGKIVSSVHYGSRYNNAAWIGDQMIYGDGDGSFFSPLSGSMDVTAHEMTHGVTQETANLNYENQPGALNESFSDVFGYFNDTEDWDIGEDITVSQPALRSLSNPTKYGQPDNFKNYKNLPNTDAGDRGGVHTNSGIPNKAAYNTITKIGVNKAEQIYYRALTVYLTPSSTFSDAKAALIQSARDLYGSQDAASVEAAWNAVGL

SEQ ID NO: 71587 - protein, 300 aa, Bacillus amyloliquefaciens
AATTGTGTTLKGKTVSLNISSESGKYVLRDLSKPTGTQIITYDLQQREYFLPGTLVSSTTNQFTTSSQRAAVDAHYNLGKVYDYFYQKFNRNSYDNKGGKIVSSVHYGSRYNNAAWIGDQMIYGDGDGSFFSPLSGSMDVTAHEMTHGVTQETANLNYENQPGALNESFSDVFGYFNDTEDWDIGEDITVSQPALRSLSNPTKYGQPDNFKNYKNLPNTDAGDYGGVHTNSGIPNKAAYNTITKIGVNKAEQIYYRALTVYLTPSSTFKDAKAALIQSARDLYGSQDAASVEAAWNAVGL

SEQ ID NO: 71588 - protein, 300 aa, Bacillus amyloliquefaciens
AATTGTGTTLKGKTVSLNISSESGKYVLRDLSKPTGTQIITYDLQNREYNLPGTLVSSTTNQFTTSSQRAAVDAHYNLGKVYDYFYQKFNRNSYDNKGGKIVSSVHYGSRYNNAAWIGDQMIYGDGDGSFFSPLSISMDVTAHEMTHGVTQETANLNYENQPGALNESFSDVFGYFNDTEDWDIGEDITVSQPALRSLSNPTKYGQPDNFKNYKNLPNTDAGDRGGVHTNSGIPNKAAYNTITKIGVNKAEQIYYRALTVYLTPSSTFKDAKAALIQSARDLYGSQDAASVEAAWNAVGL

SEQ ID NO: 71589 - protein, 300 aa, Bacillus amyloliquefaciens
AATTGTGTTLKGKTVSLNISSESGKYVLRDLSKPTGTQIITYDLQNREYNLPGTLVSSTTNQFTTSSQRAAVDAHYNLGKVYDYFYQKFNRNSYDNKGGKIVSSVHYGSSYNNAAWIGDQMIYGDGDGSFFSPLSGSMDVTAHEMTHGVTQETANLNYENQPGALNESFSDVFGYFNDTEDWDIGEDITVSQPALRSLSNPTKYGQPDNFKNYKNLPNTDAGDRGGVHTNSGIPNKAAYNTITKIGVNKAEQIYYRALTVYLTPSSTFKDAKAALIQSARDLYGSQDAASVEAAWNAVGL

SEQ ID NO: 71590 - protein, 300 aa, Bacillus amyloliquefaciens
AATTGTGTTLKGKTVSLNISSESGKYVLRDLSKPTGTQIITYDLQNREYNLPGTLVSSTTNQFTTSSQRAAVDAHYNLGKVYDYFYQKFNRNSYDNKGGKIVSSVHYGSRYNNAAWIGDQMIYGDGDGSFFSPLSGSMRVTAHEMTHGVTQETANLNYENQPGALNESFSDVFGYFNDTEDWDIGEDITVSQPALRSLSNPTKYGQPDNFKNYKNLPNTDAGDRGGVHTNSGIPNKAAYNTITKIGVNKAEQIYYRALTVYLTPSSTFKDAKAALIQSARDLYGSQDAASVEAAWNAVGL

SEQ ID NO: 71591 - protein, 300 aa, Bacillus amyloliquefaciens
AATVGTGTTLKGKTVSLNISSENGKYVLRDLSKPTGTQIITYDLQNREYNLPGTLVSSTTNQFTTSSQRAAVDAHYNLGKVYDYFYQKFNRNSYDNKGGKIVSSVHYGSRYNNAAWIGDQMIYGDGDGSFFSPLSGSMDVTAHEMTHGVTQETANLNYENQPGALNESFSDVFGYFNDTEDWDIGEDITVSQPALRSLSNPTKYGQPDNFKNYKNLPNTDAGDYGGVHTNSGIPNKAAYNTITKIGVNKAEQIYYRALTVYLTPSSTFKDAKAALIQSARDLYGSQDAASVEAAWNAVGL

SEQ ID NO: 71592 - protein, 300 aa, Bacillus amyloliquefaciens
AATTGTGTTLKGKTVSLNISSESGKYVLRDLSKPTGTQIITYDLQNREYNLPGTLVSSTTNQFTTSSQRAAVDAHYNLGKVYDYFYQKFNRNSYDNKGGKIVSSVHYGSRYNNAAWIGDQMIYGDGDGSFFSPLSGSMDVTAHEMTHGVTQETANLNYENQPGALNESFSDVFGYFNDTEDWDIGEDITVSQPALRSLSNPTKYGQPDNFKNYKNLPNTDAGDRGGVHTNSGIPNKAAYNTITKIGVNKAEQIYYRALTVYLLPSSTFKDAKAALIQSARDLYGSQDAASVEAAWNAVGL

SEQ ID NO: 71593 - protein, 300 aa, Bacillus amyloliquefaciens
AATTGTGTTLKGKTVSLNISSESGKYVLRDLSKPTGTQIITYDLQNREYNLPGTLVSSTTNQFTTSSQRAAVDAHYNLGKVYDYFYQKFNRNSYDNKGGKIVSSVHYGSRYNNAAWIGDQMIYGDGDGSFFSPLSGSMDVTAHEMTHGVTQETANLNYENQPGALNESFSDVFGYFNDTEDWDIGEDITVSQPALRSLSNPTKYGQPDNFKNYKNLPNTDAGDRGGVHTNSGIPNKAAYNTITKIGVNKAEQIYYRALTVYLTPSSTFHDAKAALIQSARDLYGSQDAASVEAAWNAVGL

SEQ ID NO: 71594 - protein, 300 aa, Bacillus amyloliquefaciens
AATTGTGTTLKGKTVSLNISSESGKYVLRDLSKPTGTQIITYDLQNREYNLPGTLVSSTTNQFTTSSQRAAVDAHYNLGKVYDYFYQKFNRNSYDNKGGKIVSSVHYGSRYNNAAWIGDQMIYGDGDGSFFSPLSGSMDVTAHEMTHGVTQETANLNYENQPGALNESFSDVFGYFNDTEDWDIGEDITVSQPALRSLSNPTKYGQPDNFKNYKNLPNTDAGDRGGVHTNSGIPNKAAYNTITKIGVNKAEQIYYRALTVYLTPSSTFNDAKAALIQSARDLYGSQDAASVEAAWNAVGL

SEQ ID NO: 71595 - protein, 300 aa, Bacillus amyloliquefaciens
AATTGTGTTLKGKTVSLNISSESGKYVLRDLSKPTGTQIITYDLQNREYNLPGTLVSSTTNQFTTSSQRAAVDAHYNLGKVYDYFYQKFNRNSYDNKGGKIVSSVHYGSRYNNAAWIGDQMIYGDGDGSFFSPLSGSMDVTAHEMTHGVTQETANLNYENQPGALNESFSDVFGYFNDTEDWDIGEDITVSQPALRSLSNPTKYGQPNDFKNYKNLPNTDAGDYGGVHTNSGIPNKAAYNTITKIGVNKAEQIYYRALTVYLTPSSTFKDAKAALIQSARDLYGSQDAASVEAAWNAVGL

SEQ ID NO: 71596 - protein, 300 aa, Bacillus amyloliquefaciens
AATTGTGTTLKGKTVSLNISSESGKYVLRDLSKPTGTQIITYDLQNREYNLPGTLVSSTTNQFTTSSQRAAVDAHYNLGKVYDYFYQKFNRNSYDNKGGKIVSSVHYGSRYNNAAWIGDQMIYGDGDGSFFSPLSGSMDVTAHEMTHGVTQETANLNYENQPGALNESFSDVFGYFNDTEDWDIGHDITVSQPALRSLSNPTKYGQPDNFKNYKNLPNTDAGDRGGVHTNSGIPNKAAYNTITKIGVNKAEQIYYRALTVYLTPSSTFKDAKAALIQSARDLYGSQDAASVEAAWNAVGL

SEQ ID NO: 71597 - protein, 300 aa, Bacillus amyloliquefaciens
AATTGTGTTLKGKTVSLNISSESGKYVLRDLSKPTGTQIITYDLQNREYNLPGTLVSSTTNQFTTSSQRAAVDAHYNLGKVYDYFYQKFNRNSYDNKGGKIVSSVHYGSRYNNAAWIGDQMIYGDGDGSFFSPLSGSMDVTAHEMTHGVTQETANLNYENQPGALNESFSDVFGYFNDTEDWDIGEDITVSQPALRSLSNPTKYGQPDNFKNYKNLPNTDAGDRGGVHTNSGIPNKAAYNTITKIGVNKAEQIYYRALTVYLTPESTFKDAKAALIQSARDLYGSQDAASVEAAWNAVGL

SEQ ID NO: 71598 - protein, 300 aa, Bacillus amyloliquefaciens
AATTGTGTTLKGKTVSLNISSESGKYVLRDLSKPTGTQIITYDLQNREYNLPGTLVSSTTNQFTTSSQRAAVDAHYNLGKVYDYFYQKFNRNSYDNKGGKIVSSVHYGSRYNNAAWIGDQMIYGDGDGSFFSPLSGSMDVTAHEMTHGVTQETANLNYENQPGALNESFSDVFGYFNDTEDWDIGEDITVSQPALRSLSNPTKYGQPDNFKNYKNLPNTDAGDRGGVHTNSGIPNKAAYNTITKIGVNKAEQIYYRALTVYLTPSSTFKDAKAALIQSARDLYGWQDAASVEAAWNAVGL

SEQ ID NO: 71599 - protein, 300 aa, Bacillus amyloliquefaciens
AATTGTGTTLKGKTVSLNISSESGKYVLRDLSKPTGTQIITYDLQNREYNLPGTLVSSTTNQFTTSSQRAAVDAHYNLGKVYDYFYQKFNRNSYDNKGGKIVSSVHYGSRYNNAAWIGDQMIYGDGDGSFFSPLSGSMDVTAHEMTHGVTQETANLNYENQPGALNESFSDVFGYFNDTEDWDIGEDITVSQPALRSLSNPTKYGQPDNFKNYKNLPNTDAGDRGGVHTNSGIPNKAAYNTITKIGVNKAEQIYYRALTVYLTPSSTFKDAKYALIQSARDLYGSQDAASVEAAWNAVGL

SEQ ID NO: 71600 - protein, 300 aa, Bacillus amyloliquefaciens
AATTGTGTTLKGKTVSLNISSESGKYVLRDLSKPTGTQIITYDLQNREYNLPGTLVSSTTNQFTTSSQRAAVDAHYNLGKVYDYFYQKFNRNSYDNKGGKIVSSVHYGSRYNNAAWIGDQMIYGDGDGSFFSPLSGSMKVTAHEMTHGVTQETANLNYENQPGALNESFSDVFGYFNDTEDWDIGEDITVSQPALRSLSNPTKYGQPDNFKNYKNLPNTDAGDRGGVHTNSGIPNKAAYNTITKIGVNKAEQIYYRALTVYLTPSSTFKDAKAALIQSARDLYGSQDAASVEAAWNAVGL

SEQ ID NO: 71601 - protein, 300 aa, Bacillus amyloliquefaciens
AATTGTGTTLKGKTVSLNISSESGKYVLRDLSKPTGTQIITYDLQNREYNLPGTLVSSTTNQFTTSSQRAAVDAHYNLGKVYDYFYQKFNRNSYDNKGGKIVSSVHYGSRYNNAAWIGDQMIYGDGDGSFFSPLSGSMDVTAHEMTHGVTQETANLNYENQPGALNESFSDVFGYFNDTEDWDIGEDITVSQPALRSLSNPTKYGQPDNFGNYKNLPNTDAGDRGGVHTNSGIPNKAAYNTITKIGVNKAEQIYYRALTVYLTPSSTFKDAKAALIQSARDLYGSQDAASVEAAWNAVGL

SEQ ID NO: 71602 - protein, 300 aa, Bacillus amyloliquefaciens
AATTGTGTTLKGKTVSLNISSESGKYVLRDLSKPTGTQIITYDLQNREYNLPGTLVSSTTNQFTTSSQRAAVDAHYNLGKVYDYFYQKFNRNSYDNKGGKIVSSVHYGSRYNNAAWIGDQMIYGDGDGSFFSPLSGSMDVTAHEMTHGVTQETANLNYENQPGALNESFSDVFGYFNDTEDWDIGEDITVSQPALRSLSNPTKYGQPDNFKNYKNLPNTDAGDRGGVHTNSGIPNKAAYNTITKIGVNKAEQIYYRALTVYLTPSSTFKDAKAALIQSARDLYGSQDAASVEAAWNQVGL

SEQ ID NO: 71603 - protein, 300 aa, Bacillus amyloliquefaciens
AATLGTGTTLKGKTVSLNISSEWGKYVLRDLSKPTGTQIITYDLQNREYNLPGTLVSSTTNQFTTSSQRAAVDAHYNLGKVYDYFYQKFNRNSYDNKGGKIVSSVHYGSRYNNAAWIGDQMIYGDGDGSFFSPLSGSMDVTAHEMTHGVTQETANLNYENQPGALNESFSDVFGYFNDTEDWDIGEDITVSQPALRSLSNPTKYGQPDNFKNYKNLPNTDAGDYGGVHTNSGIPNKAAYNTITKIGVNKAEQIYYRALTVYLTPSSTFKDAKAALIQSARDLYGSQDAASVEAAWNAVGL

SEQ ID NO: 71604 - protein, 300 aa, Bacillus amyloliquefaciens
AATTGTGTTLKGKTVSLNISSESGKYVLRDLSKPTGTQIITYDLQNREYNLPGTLVSSTTNQFTTSSQRAAVDAHYNLGKVYDYFYQKFNRNSYDNKGGKIVSSVHYGSRYNNAAWIGDQMIYGDGDGSFFSPLSGSMDVTAHEMTHGVTQETANLNYENQPGALNESFSDVFGYFNDTEDWDIGEDITVSQPALRSLSNPTKYGQPDNFKNYKNLPNTDSGDRGGVHTNSGIPNKAAYNTITKIGVNKAEQIYYRALTVYLTPSSTFKDAKAALIQSARDLYGSQDAASVEAAWNAVGL

SEQ ID NO: 71605 - protein, 300 aa, Bacillus amyloliquefaciens
AATTGTGTTLKGKTVSLNISSESGKYVLRDLSKPTGTQIITYDLQNREYNLPGTLVSSTTNQFTTSSQRAAVDAHYNLGKVYDYFYQKFNRNSYDNKGGKIVSSVHYGSRYNNAAWIGDQMIYGDGDGSFFSPLSGSMDVTAHEMTHGVTQETANLNYENQPGALNESFSDVFGYFNTTEDWDIGEDITVSQPALRSLSNPTKYGQPDNFKNYKNLPNTDAGDRGGVHTNSGIPNKAAYNTITKIGVNKAEQIYYRALTVYLTPSSTFKDAKAALIQSARDLYGSQDAASVEAAWNAVGL

SEQ ID NO: 71606 - protein, 300 aa, Bacillus amyloliquefaciens
AATTGTGTTLKGKTVSLNISSESGKYVLRDLSKPTGTQIITYDLQNREYNLPGTLVSSTTNQFTTSSQRAAVDAHYNLGKVYDYFYQKFNRNSYDNKGGKIVSSVHYGSRYNNAAWIGDQMIYGDGDGSFFSPLSGSMDVTAHEMTHGVTQETANLNYENQPGALNESFSDVFGYFNDTEDWDIGEDITVSQPALRSLSNPTKYGQPDNFKNYKNLPNTDAGDRGGVHTNSGIPNKAAYNTITKIGVNKAEQIYYRALTVYLTPSSTFKDAKQALIQSARDLYGSQDAASVEAAWNAVGL

SEQ ID NO: 71607 - protein, 300 aa, Bacillus amyloliquefaciens
AATTGTGTTLKGKTVSLNISSESGKYVLRDLSKPTGTQIITYDLQNREYNLPGTLVSSTTNQFTTSSQRAAVDAHYNLGKVYDYFYQKFNRNSYDNKGGKIVSSVHYGSRYNNAAWIGDQMIYGDGDGSFFSPLSGSMDVTAHEMTHGVTQETANLNYENQPGALNESFSDVFGYFNDTEDWDIGEDITVSQPALRSLSNPTKYGQPDNFKNYKNLPNTDAGDRGGVHTNSGIPNKAAYNTITVIGVNKAEQIYYRALTVYLTPSSTFKDAKAALIQSARDLYGSQDAASVEAAWNAVGL

SEQ ID NO: 71608 - protein, 300 aa, Bacillus amyloliquefaciens
AATTGTGTTLKGKTVSLNISSESGKYVLRDLSKPTGTQIITYDLQNREYNLPGTLVSSTTNQFTTSSQRAAVDAHYNLGKVYDYFYQKFNRNSYDNKGGKIVSSVHYGSRYNNAAWIGDQMIYGDGDGSFFSPLSGSMDVTAHEMTHGVTQETANLNYENQPGALNESFSDVFGYFNDTEDWDIGEDITVSQPALRSLSNPTKYGQPDNFKNYKNLPNTDAGDRGGVHTNSGIPNKAAYNTITKIGVNKAEQIYYRALTVYLTPSSTFKDAKAALIQSARDLYGSQDAASVEAAWNAVNL

SEQ ID NO: 71609 - protein, 300 aa, Bacillus amyloliquefaciens
AATTGTGTTLKGKTVSLNISSESGKYVLRDLSKPTGTQIITYDLQNREYNLPGTLVSSTTNQFTTSSQRAAVDAHYNLGKVYDYFYQKFNRNSYDNKGGKIVSSVHYGSRYNNAAWIGDQMIYGDGDGSFFSPLSGSMDVTAHEMTHGVTQETANLNYENQPGALNESFSDVFGYFNDTEDWDIGEDITVSQPALRSLENPTKYGQPDNFKNYKNLPNTDAGDYGGVHINSGIPNKAAYNTITKIGVNKAEQIYYRALTVYLTPSSTFKDAKAALIQSARDLYGSQDAASVEAAWNAVGL

SEQ ID NO: 71610 - protein, 300 aa, Bacillus amyloliquefaciens
AATTGTGTTLKGKTVSLNISSESGKYVLRDLSKPTGTQIITYDLQNREYNLPGTLVSSTTNQFTCSSQRAAVDAHYNLGKVYDYFYQKFNRNSYDNKGGKIVSSVHYGSRYNNAAWIGDQMIYGDGDGSFFSPLSGSMDVTAHEMTHGVTQETANLNYENQPGALNESFSDVFGYFNDTEDWDIGEDITVSQPALRSLSNPTKYGQPDNFKNYKNLPNTDAGDRGGVHTNSGIPNKAAYNTITKIGVNKAEQIYYRALTVYLTPSSTFKDAKAALIQSARDLYGSQDAASVEAAWNAVGL

SEQ ID NO: 71611 - protein, 300 aa, Bacillus amyloliquefaciens
AATTGTGTTLKGKTVSLNISSESGKYVLRDLSKPTGTQIITYDLQNREYNLPGTLVSSTTNQFTTSSQRAAVDAHYNLGKVYDYFYQKFNRNSYDNKGGKIVSSVHYGSRYNNAAWIGDQMIYGDGDGSFFSPLSGSMDVTAHEMTHGVTQETANLNYENQPGALNESFSDVFGYFNDTEDWDIGEDITVSQPALRSLSNPTKYGQPDNFKNYKNLPNTDAGDRGGVHTNSGIPNKAAYNTITKIGVNKAEQIYYRALTVYLTPSSTFKDAKAALIQSARDYYGSQDAASVEAAWNAVGL

SEQ ID NO: 71612 - protein, 300 aa, Bacillus amyloliquefaciens
AATVGTGTTLKGKTVSLNISSESWKYVLRDLSKPTGTQIITYDLQNREYNLPGTLVSSTTNQFTTSSQRAAVDAHYNLGKVYDYFYQKFNRNSYDNKGGKIVSSVHYGSRYNNAAWIGDQMIYGDGDGSFFSPLSGSMDVTAHEMTHGVTQETANLNYENQPGALNESFSDVFGYFNDTEDWDIGEDITVSQPALRSLSNPTKYGQPDNFKNYKNLPNTDAGDYGGVHTNSGIPNKAAYNTITKIGVNKAEQIYYRALTVYLTPSSTFKDAKAALIQSARDLYGSQDAASVEAAWNAVGL

SEQ ID NO: 71613 - protein, 300 aa, Bacillus amyloliquefaciens
AATTGTGTTLKGKTVSLNISSESGKYVLRDLSKPTGTQIITYDLQNREYNLPGTLVSSTTNQFTTSSQRAAVDAHYNLGKVYDYFYQKFNRNSYDNKGGKIVSSVHYGSRYNNAAWIGDQMIYGDGDGSFFSPLSGSMDVTAHEMTHGVTQETANLNYENQPGALNESFSDVFGYFNPTEDWDIGEDITVSQPALRSLSNPTKYGQPDNFKNYKNLPNTDAGDRGGVHTNSGIPNKAAYNTITKIGVNKAEQIYYRALTVYLTPSSTFKDAKAALIQSARDLYGSQDAASVEAAWNAVGL

SEQ ID NO: 71614 - protein, 300 aa, Bacillus amyloliquefaciens
AATTGTGTTLKGKTVSLNISSESGKYVLRDLSKPTGTQIITYDLQNREYNLPGTLVSSTTNQFTTSSQRAAVDAHYNLGKVYDYFYQKFNRNSYDNKGGAIVSSVHYGSRYNNAAWIGDQMIYGDGDGSFFSPLSGSMDVTAHEMTHGVTQETANLNYENQPGALNESFSDVFGYFNDTEDWDIGEDITVSQPALRSLSNPTKYGQPDNFKNYKNLPNTDAGDRGGVHTNSGIPNKAAYNTITKIGVNKAEQIYYRALTVYLTPSSTFKDAKAALIQSARDLYGSQDAASVEAAWNAVGL

SEQ ID NO: 71615 - protein, 300 aa, Bacillus amyloliquefaciens
AATTGTGTTLKGKTVSLNISSESGKYVLRDLSKPTGTQIITYDLQNREYNLPGTLVSSTTNQFTTSSQRAAVDAHYNLGKVYDYFYQKFNRNSYDNKGGKIVSSVHYGSRYNNAAWIGDQMIYGDGDGSFFSPLSGSMDVTAHEMTHGVTQETANLNYENQPGALNESFSDVFGYFNDTEDWDIGEDITVSQPALRSLSNPTKYGQPDNFKNYKNLPNTDDGDRGGVHTNSGIPNKAAYNTITKIGVNKAEQIYYRALTVYLTPSSTFKDAKAALIQSARDLYGSQDAASVEAAWNAVGL

SEQ ID NO: 71616 - protein, 300 aa, Bacillus amyloliquefaciens
AATTGTGTTLKGKTVSLNISSESGKYVLRDLSKPTGTQIITYDLQNREYNLPGTLVSSTTNQFTTSSQRAAVDAHYNLGKVYDYFYQKFNRNSYDNKGGKIVSSVHYGSRYNNAAWIGDQMIYGDGDGSFFSPLSGSMDVTAHEMTHGVTQETANLNYENQPGALNESFSDVFGYFNDTEDWDIGEDITVSQPALRSLSNPTKYGQPDNFKNYKNLPNTDAGDRGGVHTNSGIPNKAAYNTIWKIGVNKAEQIYYRALTVYLTPSSTFKDAKAALIQSARDLYGSQDAASVEAAWNAVGL

SEQ ID NO: 71617 - protein, 300 aa, Bacillus amyloliquefaciens
AATTGTGTTLKGKTVSLNISSESGKYVLRDLSKPTGTQIITYDLQNREYNLPGTLVSSTTNQFTTSSQRAAVDAHYNLGKVYDYFYQKFNRNSYDNKGGKIVSSVHYGSRYNNAAWIGDQMIYGDGDGSFFSPLSGSMDVTAHEMTHGVTQETANLNYENQPGALNESFSDVFGYFNDTEDWDIGEDITVSQPALRSLSNPTKYGQPDNFKNYKNLPNTDAGDRGGVHTNSGIPNKAAYNTITKIGVNKAEQIYYRALTVYLTPSSTFKDAKAALIQSARDLYGSQDAASVEAAWDAVGL

SEQ ID NO: 71618 - protein, 300 aa, Bacillus amyloliquefaciens
AATTGTGTTLKGKTVSLNISSESGKYVLRDLSKPTGTQIITYDLQNREYNLPGTLVSSTTNQFTTSSQRAAVDAHYNLGKVYDYFYQKFNRNSYDNKGGKIVSSVHYGSRYNNAAWIGDQMIYGDGDGSFFSPLSGSMDVTAHEMTHGVTQETANLNYENQPGALNESFSDVFGYFNDTEDWDIGEDITVSQPALRSLSNPTKYGQPDNFTNYKNLPNTDAGDRGGVHTNSGIPNKAAYNTITKIGVNKAEQIYYRALTVYLTPSSTFKDAKAALIQSARDLYGSQDAASVEAAWNAVGL

SEQ ID NO: 71619 - protein, 300 aa, Bacillus amyloliquefaciens
AATTGTGTTLKGKTVSLNISSESGKYVLRDLSKPTGTQIITYDLQNREYNLPGTLVSSTTNQFTTSSQRAAVDAHYNLGKVYDYFYQKFNRNSYDNKGGKIVSSVHYGSRYNNAAWIGDQMIYGDGDGSFFSPLSGSMDVTAHEMTHGVTQETANLNYENQPGALNESFSDVFGYFNDTEDWDIGEDITVSQPALRSLSNPTKYGQPDNFKNYKNLPNTDAGDRGGVHTNSGIPNKAAYNTITKIGVNKAEQIYYRALTVYLTPSSTFKDAKAALIQSARDIYGSQDAASVEAAWNAVGL

SEQ ID NO: 71620 - protein, 300 aa, Bacillus amyloliquefaciens
AATTGTGTTLKGKTVSLNISSESGKYVLRDLSKPTGTQIITYDLQNREYNLPGTLVSSTTNQFTTSSQRAAVDAHYNLGKVYDYFYQKFNRNSYDNKGGKIVSSVHYGSRYNNAAWIGDQMIYGDGDGSFFSPLSGSMDVTAHEMTHGVTQETANLNYENQPGALNESFSDVFGYFNDTEDWDIGEDITVSQPALRSLSNPTKYGQPDNFKNYKNLPNTDAGDRGGVHTNSGIPNKAAYNTITKIGVNKAEQIYYRALTVYLTPSSTFEDAKAALIQSARDLYGSQDAASVEAAWNAVGL

SEQ ID NO: 71621 - protein, 300 aa, Bacillus amyloliquefaciens
AATTGTGTTLKGKTVSLNISSESGKYVLRDLSKPTGTQIITYDLQNREYNLPGTLVSSKTNQFTTNSQRAAVDAHYNLGKVYDYFYQKFNRNSYDNKGGKIVSSVHYGSRYNNAAWIGDQMIYGDGDGSFFSPLSGSMDVTAHEMTHGVTQETANLNYENQPGALNESFSDVFGYFNDTEDWDIGEDITVSQPALRSLSNPTKYGQPDNFKNYKNLPNTDAGDYGGVHTNSGIPNKAAYNTITKIGVNKAEQIYYRALTVYLTPSSTFKDAKAALIQSARDLYGSQDAASVEAAWNAVGL

SEQ ID NO: 71622 - protein, 300 aa, Bacillus amyloliquefaciens
AATTGTGTTLKGKTVSLNISSESGKYVLRDLSKPTGTQIITYDLQNREYNLPGTLVSSTTNQFTTSSQRAAVDAHYNLGKVYDYFYQKFNRNSYDNKGGKIVSSVHYGSRYNNAAWIGDQMIYGDGDGSFFSPLSGSMDVTAHEMTHGVTQETANLNYENQPGALNESFSDVFGYFNDTEDWDIGEDITVSQPALRSLSNPTKYGQPDNFKNYKNLPNTDAGDRGGVHTNSGIPNKAAYNTITWIGVNKAEQIYYRALTVYLTPSSTFKDAKAALIQSARDLYGSQDAASVEAAWNAVGL

SEQ ID NO: 71623 - protein, 300 aa, Bacillus amyloliquefaciens
AATTGTGTTLKGKTVSLNISSESGKYVLRDLSKPTGTQIITYDLQNREYNLPGTLVSSTTNQFTTSSQRAAVDAHYNLGKVYDYFYQKFNRNSYDNKGGKIVSSVHYGSRYNNAAWIGDQMIYGDGDGSFFSPLSGSMDVTAHEMTHGVTQETANLNYENQPGALNESFSDVFGYFNDTEDWDIGEDITVSQPALRSLSNPTKYGQPDNFKNYKNLPNTDAGDRGGVHTNSGIPNKAAYNTITKIGVNKAEQIYYRALTVYLTPSSTFMDAKAALIQSARDLYGSQDAASVEAAWNAVGL

SEQ ID NO: 71624 - protein, 300 aa, Bacillus amyloliquefaciens
AATTGTGTTLKGKTVSLNISSESGKYVLRDLSKPTGTQIITYDLQNREYNLPGTLVSSCTNQFTTSSQRAAVDAHYNLGKVYDYFYQKFNRNSYDNKGGKIVSSVHYGSRYNNAAWIGDQMIYGDGDGSFFSPLSGSMDVTAHEMTHGVTQETANLNYENQPGALNESFSDVFGYFNDTEDWDIGEDITVSQPALRSLSNPTKYGQPDNFKNYKNLPNTDAGDRGGVHTNSGIPNKAAYNTITKIGVNKAEQIYYRALTVYLTPSSTFKDAKAALIQSARDLYGSQDAASVEAAWNAVGL

SEQ ID NO: 71625 - protein, 300 aa, Bacillus amyloliquefaciens
AATTGTGTTLKGKTVSLNISSESGKYVLRDLSKPTGTQIITYDLQNREYNLPGTLVSSTTNQFTTSSQRAAVDAHYNLGKVYDYFYQKFNRNSYDNKGGDIVSSVHYGSRYNNAAWIGDQMIYGDGDGSFFSPLSGSMDVTAHEMTHGVTQETANLNYENQPGALNESFSDVFGYFNDTEDWDIGEDITVSQPALRSLSNPTKYGQPDNFKNYKNLPNTDAGDRGGVHTNSGIPNKAAYNTITKIGVNKAEQIYYRALTVYLTPSSTFKDAKAALIQSARDLYGSQDAASVEAAWNAVGL

SEQ ID NO: 71626 - protein, 300 aa, Bacillus amyloliquefaciens
AATTGTGTTLKGKTVSLNISSESGKYVLRDLSKPTGTQIITYDLQNREYNLPGTLVSSTTNQFTTSSQRAAVDAHYNLGKVYDYFYQKFNRNSYDNKGGKIVSSVHYGSRYNNAAWIGDQMIYGDGDGSFFSPLSGSMDVTAHEMTHGVTQETANLNYENQPGALNESFSDVFGYFNDTEDWDIGEDITVSQPALRSLSNPTKYGQPDNFKNYKNLPNTDAGDYGGVHTNSGIPNKAAYNTITKIGVNKAEQIYYRALTVYLTPSSTFKDAKAALIQSARDFYGSKDAASVEAAWNAVGL

SEQ ID NO: 71627 - protein, 300 aa, Bacillus amyloliquefaciens
AATTGTGTTLKGKTVSLNISSESGKYVLRDLSKPTGTQIITYDLQNREYNLPGTLVSSTTNQFTTSSQRAAVDAHYNLGKVYDYFYQKFNRNSYDNKGGKIVSSVHYGSRYNNAAWIGDQMIYGDGDGSFFSPLSGSMDVTAHEMTHGVTQETANLNYENQPGALNESFSDVFGYFNDTEDWDIGEDITVSQPALRSLSNPTKYGQPDNFKNYKNLPNTDAGDRGGVHTNSGIPNKAAYNTITKIGVNKAEQIYYRALTVYLTPSSTFTDAKAALIQSARDLYGSQDAASVEAAWNAVGL

SEQ ID NO: 71628 - protein, 300 aa, Bacillus amyloliquefaciens
AATTGTGTTLKGKTVSLNISSESGKYVLRDLSKPTGTQIITYDLQNREYFLPGHLVSSTTNQFTTSSQRAAVDAHYNLGKVYDYFYQKFNRNSYDNKGGKIVSSVHYGSRYNNAAWIGDQMIYGDGDGSFFSPLSGSMDVTAHEMTHGVTQETANLNYENQPGALNESFSDVFGYFNDTEDWDIGEDITVSQPALRSLSNPTKYGQPDNFKNYKNLPNTDAGDYGGVHTNSGIPNKAAYNTITKIGVNKAEQIYYRALTVYLTPSSTFKDAKAALIQSARDLYGSQDAASVEAAWNAVGL

SEQ ID NO: 71629 - protein, 300 aa, Bacillus amyloliquefaciens
AATTGTGTTLKGKTVSLNISSESGKYVLRDLSKPTGTQIITYDLQNREYNLPGTLVSSTTNQFTTSSQRAAVDAHYNLGKVYDYFYQKFNRNSYDNKGGKIVSSVHYGSRYNNAAWIGDQMIYGDGDGSFFSPLSGSMDVTAHEMTHGVTQETANLNYENQPGALNESFSDVFGYFNDTEDWDIGEDITVSQPALRSLSNPTKYGQPDNFKNYKNLPNTDAGDRGGVHTNSGIPNKAAYNTITKIGVNKAEQIYYRALTVYLTPSSTFKDAKAALIQSAFDLYGSQDAASVEAAWNAVGL

SEQ ID NO: 71630 - protein, 300 aa, Bacillus amyloliquefaciens
AATTGTGTTLKGKTVSLNISSESGKYVLRDLSKPTGTQIITYDLQNREYNLPGTLVSSTTNQFTTSSQRAAVDAHYNLGKVYDYFYQKFNRNSYDNKGGKIVSSVHYGSRYNNAAWIGDQMIYGDGDGSFFSPLSGSMDVTAHEMTHGVTQETANLNYENQPGALNESFSDVFGYFNDTEDWDIGEDITVSQPALRSLSNPTKYGQPDNFKNYKNLPNTDAGDYGGVHTNSGIPNKAAYNTITKIGVNKAEQIYYRALTVYLTPSSTFKDAKHALIQSARDLYGRQDAASVEAAWNAVGL

SEQ ID NO: 71631 - protein, 300 aa, Bacillus amyloliquefaciens
AATTGTGTTLKGKTVSLNISSESGKYVLRDLSKPTGTQIITYDLQNREYNLPGTLVSSTTNQFTTSSQRAAVDAHYNLGKVYDYFYAKFNRNSYDNKGGKIVSSVHYGSRYNNAAWIGDQMIYGDGDGSFFSPLSGSMDVTAHEMTHGVTQETANLNYENQPGALNESFSDVFGYFNDTEDWDIGEDITVSQPALRSLSNPTKYGQPDNFKNYKNLPNTDAGDRGGVHTNSGIPNKAAYNTITKIGVNKAEQIYYRALTVYLTPSSTFKDAKAALIQSARDLYGSQDAASVEAAWNAVGL

SEQ ID NO: 71632 - protein, 300 aa, Bacillus amyloliquefaciens
AATTGTGTTLKGKTVSLNISSESGKYVLRDLSKPTGTQIITYDLQNREYNLPGTLVSSTTNQFTTSSQRAAVDAHYNLGKVYDYFYQKFNRNSYDNKGGKIVSSVHYGSRYNNAAWIGDQMIYGDGDGSFFSPLSGSMDVTAHEMTHGVTQETANLNYENQPGALNESFSDVFGYFNDTEDWDIGEDITVSQPALRSLSNPTKYGQPDNFKNYKNLPNTDAGDRGGVHTNSGIPNKAAYNTIIKIGVNKAEQIYYRALTVYLTPSSTFKDAKAALIQSARDLYGSQDAASVEAAWNAVGL

SEQ ID NO: 71633 - protein, 300 aa, Bacillus amyloliquefaciens
AATTGTGTTLKGKTVSLNISSESGKYVLRDLSKPTGTQIITYDLQNREYNLPGTLVSSWTNQFTTQSQRAAVDAHYNLGKVYDYFYQKFNRNSYDNKGGKIVSSVHYGSRYNNAAWIGDQMIYGDGDGQFFSPLSGSMDVTAHEMTHGVTQETANLNYENQPGALNESFSDVFGYFNDTEDWDIGEDITVSQPALRSLSNPTKYGQPDNFKNYKNLPNTDAGDYGGVHTNSGIPNKAAYNTITKIGVNKAEQIYYRALTVYLTPSSTFKDAKAALIQSARDLYGSQDAASVEAAWNAVGL

SEQ ID NO: 71634 - protein, 300 aa, Bacillus amyloliquefaciens
AATTGTGTTLKGKTVSLNISSESGKYVLRDLSKPTGTQIITYDLQNREYNLPGTLVSSTTNQFTTSSQRAAVDAHYNLGKVYDYFYQKFNRNSYDNKGGKIVSSVHYGSRYNNAAWIGDQMIYGDGDGSFFSPLSGSMDVTAHEMTHGVTQETANLNYENQPGALNESFSDVFGYFNDTEDWDIGEDITVSQPALRSLSNPTKYGQPDNFKNYQNLPNTDAGDYGGVHINSGIPNKAAYNTITKIGVNKAEQIYYRALTVYLTPSSTFKDAKAALIQSARDLYGSQDAASVEAAWNAVGL

SEQ ID NO: 71635 - protein, 300 aa, Bacillus amyloliquefaciens
AATTGTGTTLKGKTVSLNISSESGKYVLRDLSKPTGTQIITYDLQNREYNLPGTLVSSTTNQFTTSSQRAAVDAHYNLGKVYDYFYQKFNRNSYDNKGGKIVSSVHYGSRYNNAAWIGDQMIYGDGDGSFFSPLSGSMDVTAHEMTHGVTQETANLNYENQPGALNESFSDVFGYFNDTEDWDIGEDITVSQPALRSLSNPTKYGQPDNFKNYKNLPNTDAGDRGGVHTNSGIPNKAAYNTIKKIGVNKAEQIYYRALTVYLTPSSTFKDAKAALIQSARDLYGSQDAASVEAAWNAVGL

SEQ ID NO: 71636 - protein, 300 aa, Bacillus amyloliquefaciens
AATTGTGTTLKGKTVSLNISSESGKYVLRDLSKPTGTQIITYDLQNKEYNLPGLLVSSTTNQFTTSSQRAAVDAHYNLGKVYDYFYQKFNRNSYDNKGGKIVSSVHYGSRYNNAAWIGDQMIYGDGDGSFFSPLSGSMDVTAHEMTHGVTQETANLNYENQPGALNESFSDVFGYFNDTEDWDIGEDITVSQPALRSLSNPTKYGQPDNFKNYKNLPNTDAGDYGGVHTNSGIPNKAAYNTITKIGVNKAEQIYYRALTVYLTPSSTFKDAKAALIQSARDLYGSQDAASVEAAWNAVGL

SEQ ID NO: 71637 - protein, 300 aa, Bacillus amyloliquefaciens
AATTGTGTTLKGKTVSLNISSENWKYVLRDLSKPTGTQIITYDLQNREYNLPGTLVSSTTNQFTTSSQRAAVDAHYNLGKVYDYFYQKFNRNSYDNKGGKIVSSVHYGSRYNNAAWIGDQMIYGDGDGSFFSPLSGSMDVTAHEMTHGVTQETANLNYENQPGALNESFSDVFGYFNDTEDWDIGEDITVSQPALRSLSNPTKYGQPDNFKNYKNLPNTDAGDYGGVHTNSGIPNKAAYNTITKIGVNKAEQIYYRALTVYLTPSSTFKDAKAALIQSARDLYGSQDAASVEAAWNAVGL

SEQ ID NO: 71638 - protein, 300 aa, Bacillus amyloliquefaciens
AATTGTGTTLKGKTVSLNISSESAKYVLRDLSKPTGTQIITYDLQNREYNLPGTLVSSTTNQFTTSSQRAAVDAHYNLGKVYDYFYQKFNRNSYDNKGGKIVSSVHYGSRYNNAAWIGDQMIYGDGDGSFFSPLSGSMDVTAHEMTHGVTQETANLNYENQPGALNESFSDVFGYFNDTEDWDIGEDITVSQPALRSLSNPTKYGQPDNFKNYKNLPNTDAGDRGGVHTNSGIPNKAAYNTITKIGVNKAEQIYYRALTVYLTPSSTFKDAKAALIQSARDLYGSQDAASVEAAWNAVGL

SEQ ID NO: 71639 - protein, 300 aa, Bacillus amyloliquefaciens
AATTGTGTTLKGKTVSLNISSESGKYVLRDLSKPTGTQIITYDLQNREYNLPGTLVSSTTNQFTTSSQRAAVDAHYNLGKVYDYFYQKFNRNSYDNKGGKIVSSVHYGSRYNNAAWIGDQMIYGDGDGSFFSPLSYSMDVTAHEMTHGVTQETANLNYENQPGALNESFSDVFGYFNDTEDWDIGEDITVSQPALRSLSNPTKYGQPDNFKNYKNLPNTDAGDRGGVHTNSGIPNKAAYNTITKIGVNKAEQIYYRALTVYLTPSSTFKDAKAALIQSARDLYGSQDAASVEAAWNAVGL

SEQ ID NO: 71640 - protein, 300 aa, Bacillus amyloliquefaciens
AATTGTGTTLKGKTVSLNISSESGKYVLRDLSKPTGTQIITYDLQNREYNLPGTLVSSTTNQFTTSSQRAAVDAHYNLGKVYDYFYQKFNRNSYDNKGGKIVSSVHYGSRYNNAAWIGDQMIYGDGDGSFFSPLSGSMDVTAHEMTHGVTQETANLNYENQPGALNESFSDVFGYFNDTEDWDIGEDITVSQPALRSLSNPTKYGQPDNFKNYKNLPNTDAGDRGGVHTNSGIPNKAAYNTITKIGVNKAEQIYYRALTVYLTPSSTFKDAKAALIQSAGDLYGSQDAASVEAAWNAVGL

SEQ ID NO: 71641 - protein, 300 aa, Bacillus amyloliquefaciens
AATTGTGTTLKGKTVSLNISSESGKYVLRDLSKPTGTQIITYDLQNREYNLPGTLVSSKTNQFTTSSQRAAVDAHYNLGKVCDYFYQKFNRNSYDNKGGKIVSSVHYGSRYNNAAWIGDQMIYGDGDGVFFSPLSGSMDVTAHEMTHGVTQETANLNYENQPGALNESFSDVFGYFNDTEDWDIGEDITVSQPALRSLSNPTKYGQPDNFKNYKNLPNTDAGDYGGVHTNSGIPNKAAYNTITKIGVNKAEQIYYRALTVYLTPSSTFKDAKAALIQSARDLYGSQDAASVEAAWNAVGL

SEQ ID NO: 71642 - protein, 300 aa, Bacillus amyloliquefaciens
AATTGTGTTLKGKTVSLNISSESGKYVLRDLSKPTGTQIITYDLQNREYNLPGTLVSSTTNQFTTSSQRAAVDAHYNLGKVYDYFYQKFNRNSYDNKGGKIVSSVHYGSRYNNAAWIGDQMIYGDGDGSFFSPLSGSMDVTAHEMTHGVTQETANLNYENQPGALNESFSDVFGYFNDTEDWDIGEDITVSQPALRSLSNPTKYGQPDNFKNYKNLPNTDAGDRGGVHTNSGIPNKAAYNTITLIGVNKAEQIYYRALTVYLTPSSTFKDAKAALIQSARDLYGSQDAASVEAAWNAVGL

SEQ ID NO: 71643 - protein, 300 aa, Bacillus amyloliquefaciens
AATTGTGTTLKGKTVSLNISSESGKYVLRDLSKPTGTQIITYDLQNREYNLPGTLVSSTTNQFTTSSQRAAVDAHYNLGKVYDYFYQKFNRNSYDNKGGKIVSSVHYGSRYNNAAWIGDQMIYGDGDGSFFSPLSGSMDVTAHEMTHGVTQETANLNYENQPGALNESFSDVFGYFNDTEDWDIGEDITVSQPALRSLSNPTKYGQPDNFKNYKNLPNTDAGDRGGVHTNSGIPNKAAYNTITKIGVNKAEQIYYRALTVYLTPSSTFQDAKAALIQSARDLYGSQDAASVEAAWNAVGL

SEQ ID NO: 71644 - protein, 300 aa, Bacillus amyloliquefaciens
AATTGTGTTLKGKTVSLNISSESGKYVLRDLSKPTGTQIITYDLQNTEYNLPGTLVSSTTNQFTTSSQRAAVDAHYNLGKVYDYFYQKFNRNSYDNKGGKIVSSVHYGSRYNNAAWIGDQMIYGDGDGSFFSPLSGSMDVTAHEMTHGVTQETANLNYENQPGALNESFSDVFGYFNDTEDWDIGEDITVSQPALRSLSNPTKYGQPDNFKNYKNLPNTDAGDRGGVHTNSGIPNKAAYNTITKIGVNKAEQIYYRALTVYLTPSSTFKDAKAALIQSARDLYGSQDAASVEAAWNAVGL

SEQ ID NO: 71645 - protein, 300 aa, Bacillus amyloliquefaciens
AATTGTGTTLKGKTVSLNISSESGKYVLRDLSKPTGTQIITYDLQNREYNLPGTLVSSTTNQFTTSSQRAAVDAHYNLGKVYDYFYQKFNRNSYDNKGGKIVSSVHYGSRYNNAAWIGDQMIYGDGDGSFFSPLSGSMDVTAHEMTHGVTQETANLNYENQPGALNESFSDVFGYFNDTEDWDIGEDITVSQPALRSLSNPTKYGQPDNFKNYKNLPNTDAGDRGGVHTNSGIPNKAAYNTITKIGVNKAEQIYYRALTVYLTPSSTFKDAKAALIQSATDLYGSQDAASVEAAWNAVGL

SEQ ID NO: 71646 - protein, 300 aa, Bacillus amyloliquefaciens
AATTGTGTTLKGKTVSLNISSESGKYVLRDLSKPTGTQIITYDLQNREYNLPGTLVSSTTNQFTTSSQRAAVDAHYNLGKVYDYFYQKFNRNSYDNKGGKIVSSVHYGSRYNNAAWIGDQMIYGDGDGSFFSPLSGSMDVTAHEMTHGVTQETANLNYENQPGALNESFSDVFGYFNDTEDWDIGEDITVSQPALRSLSNPTKYGQPDNFKNYKNLPNTDAGDYGGVHTNSGIPNKAAYNTITKIGVNKAEQIYYRALTVYLTPSSTFKDAKHALIQSARDLYGTQDAASVEAAWNAVGL

SEQ ID NO: 71647 - protein, 300 aa, Bacillus amyloliquefaciens
AATTGTGTTLKGSTVSLNISSESGKYVLRDLSKPTGTQIITYDLQNREYNLPGTLVSSTTNQFTTSSQRAAVDAHYNLGKVYDYFYQKFNRNSYDNKGGKIVSSVHYGSRYNNAAWIGDQMIYGDGDGSFFSPLSGSMDVTAHEMTHGVTQETANLNYENQPGALNESFSDVFGYFNDTEDWDIGEDITVSQPALRSLSNPTKYGQPDNFKNYKNLPNTDAGDRGGVHTNSGIPNKAAYNTITKIGVNKAEQIYYRALTVYLTPSSTFKDAKAALIQSARDLYGSQDAASVEAAWNAVGL

SEQ ID NO: 71648 - protein, 300 aa, Bacillus amyloliquefaciens
AATTGTGTTLKGKTVSLNISSESGKYVLRDLSKPTGTQIITYDLQNREYNLPGTLVSSTTNQFTTSSQRAAVDAHYNLGKVYDYFYQKFNRNSYDNKGGKIVSSVHYGSRYNNAAWIGDQMIYGDGDGSFFSPLSGSMDVTAHEMTHGVTQETANLNYENQPGALNESFSDVFGYFNDTEDWDIGEDITVSQPALRSLSNPTKYGQPDNFANYKNLPNTDAGDRGGVHTNSGIPNKAAYNTITKIGVNKAEQIYYRALTVYLTPSSTFKDAKAALIQSARDLYGSQDAASVEAAWNAVGL

SEQ ID NO: 71649 - protein, 300 aa, Bacillus amyloliquefaciens
AATTGTGTTLKGKTVSLNISSESGKYVLRDLSKPTGTQIITYDLQNREYNLPGTLVSSRTNQFTTNSQRAAVDAHYNLGKVYDYFYQKFNRNSYDNKGGKIVSSVHYGSRYNNAAWIGDQMIYGDGDGSFFSPLSGSMDVTAHEMTHGVTQETANLNYENQPGALNESFSDVFGYFNDTEDWDIGEDITVSQPALRSLSNPTKYGQPDNFKNYKNLPNTDAGDYGGVHTNSGIPNKAAYNTITKIGVNKAEQIYYRALTVYLTPSSTFKDAKAALIQSARDLYGSQDAASVEAAWNAVGL

SEQ ID NO: 71650 - protein, 300 aa, Bacillus amyloliquefaciens
AATTGTGTTLKGKTVSLNISSESGKYVLRDLSKPTGTQIITYDLQNREYNLPGTLVSSTTNQFTTSSQRAAVDAHYNLGKVYDYFYQKFNRNSYDNKGGKIVSSVHYGSRYNNAAWIGDQMIYGDGDGSFFSPLSGSMWVTAHEMTHGVTQETANLNYENQPGALNESFSDVFGYFNDTEDWDIGEDITVSQPALRSLSNPTKYGQPDNFKNYKNLPNTDAGDRGGVHTNSGIPNKAAYNTITKIGVNKAEQIYYRALTVYLTPSSTFKDAKAALIQSARDLYGSQDAASVEAAWNAVGL

SEQ ID NO: 71651 - protein, 300 aa, Bacillus amyloliquefaciens
AATTGTGTTLKGKTVSLNISSEWYKYVLRDLSKPTGTQIITYDLQNREYNLPGTLVSSTTNQFTTSSQRAAVDAHYNLGKVYDYFYQKFNRNSYDNKGGKIVSSVHYGSRYNNAAWIGDQMIYGDGDGSFFSPLSGSMDVTAHEMTHGVTQETANLNYENQPGALNESFSDVFGYFNDTEDWDIGEDITVSQPALRSLSNPTKYGQPDNFKNYKNLPNTDAGDYGGVHTNSGIPNKAAYNTITKIGVNKAEQIYYRALTVYLTPSSTFKDAKAALIQSARDLYGSQDAASVEAAWNAVGL

SEQ ID NO: 71652 - protein, 300 aa, Bacillus amyloliquefaciens
AATTGTGTTLKGKTVSLNISSESGKYVLRDLSKPTGTQIITYDLQNREYNLPGTLVSSTTNQFTTSSQRAAVDAHYNLGKVYDYFYDKFNRNSYDNKGGKIVSSVHYGSRYNNAAWIGDQMIYGDGDGSFFSPLSGSMDVTAHEMTHGVTQETANLNYENQPGALNESFSDVFGYFNDTEDWDIGEDITVSQPALRSLSNPTKYGQPDNFKNYKNLPNTDAGDRGGVHTNSGIPNKAAYNTITKIGVNKAEQIYYRALTVYLTPSSTFKDAKAALIQSARDLYGSQDAASVEAAWNAVGL

SEQ ID NO: 71653 - protein, 300 aa, Bacillus amyloliquefaciens
AATTGTGTTLKGKTVSLNISSESGKYVLRDLSKPTGTQIITYDLQNREYNLPGTLVSSTTNQFTTSSQRAAVDAHYNLGKVYDYFYQKFNRNSYDNKGGKIVSSVHYGSRYNNAAWIGDQMIYGDGDGSFFSPLSGSMDVTAHEMTHGVTQETANLNYENQPGALNESFSDVFGYFNDTEDWDIGEDITVSQPALRSLSNPTKYGQPDNFKNYKNLPNTDAGDRGGVHTNSGIPNKAAYNTITKIGVNKAEQIYYRALTVYLTPSSTFFDAKAALIQSARDLYGSQDAASVEAAWNAVGL

SEQ ID NO: 71654 - protein, 300 aa, Bacillus amyloliquefaciens
AATTGTGTTLKGKTVSLNISSESGKYVLRDLSKPTGTQIITYDLQNREYNLPGDLVSSTTNQFTTSSQRAAVDAHYNLGKVYDYFYQKFNRNSYDNKGGKIVSSVHYGSRYNNAAWIGDQMIYGDGDGSFFSPLSGSMDVTAHEMTHGVTQETANLNYENQPGALNESFSDVFGYFNDTEDWDIGEDITVSQPALRSLSNPTKYGQPDNFKNYKNLPNTDAGDRGGVHTNSGIPNKAAYNTITKIGVNKAEQIYYRALTVYLTPSSTFKDAKAALIQSARDLYGSQDAASVEAAWNAVGL

SEQ ID NO: 71655 - protein, 300 aa, Bacillus amyloliquefaciens
AATTGTGTTLKGKTVSLNISSESGKYVLRDLSKPTGTQIITYDLQNREYNLPGTLVSSTTNQFTTSSQRAAVDAHYNLGKVYDYFYQKFNRNSYDNKGGKIVSSVHYGSRYNNAAWIGDQMIYGDGDGSFFSPLSGSMDVTAHEMTHGVTQETANLNYENQPGALNESFSDVFGYFNDTEDWDIGEDITVSQPALRSLSNPTKYGQPDNFKNYKNLPNTDAGDRGGVHTNSGIPNKAAYNTITDIGVNKAEQIYYRALTVYLTPSSTFKDAKAALIQSARDLYGSQDAASVEAAWNAVGL

SEQ ID NO: 71656 - protein, 300 aa, Bacillus amyloliquefaciens
AATLGTGTTLKGKTVSLNISSESMKYVLRDLSKPTGTQIITYDLQNREYNLPGTLVSSTTNQFTTSSQRAAVDAHYNLGKVYDYFYQKFNRNSYDNKGGKIVSSVHYGSRYNNAAWIGDQMIYGDGDGSFFSPLSGSMDVTAHEMTHGVTQETANLNYENQPGALNESFSDVFGYFNDTEDWDIGEDITVSQPALRSLSNPTKYGQPDNFKNYKNLPNTDAGDYGGVHTNSGIPNKAAYNTITKIGVNKAEQIYYRALTVYLTPSSTFKDAKAALIQSARDLYGSQDAASVEAAWNAVGL

SEQ ID NO: 71657 - protein, 300 aa, Bacillus amyloliquefaciens
AATVGTGTTLKGKTVSLNISSESYKYVLRDLSKPTGTQIITYDLQNREYNLPGTLVSSTTNQFTTSSQRAAVDAHYNLGKVYDYFYQKFNRNSYDNKGGKIVSSVHYGSRYNNAAWIGDQMIYGDGDGSFFSPLSGSMDVTAHEMTHGVTQETANLNYENQPGALNESFSDVFGYFNDTEDWDIGEDITVSQPALRSLSNPTKYGQPDNFKNYKNLPNTDAGDYGGVHTNSGIPNKAAYNTITKIGVNKAEQIYYRALTVYLTPSSTFKDAKAALIQSARDLYGSQDAASVEAAWNAVGL

SEQ ID NO: 71658 - protein, 300 aa, Bacillus amyloliquefaciens
AATTGTGTTLKGKTVSLNISSESGKYVLRDLSKPTGTQIITYDLQNREYNLPGTLVSSTTNQFTTSSQRAAVDAHYNLGKVYDYFYQKFNRNSYDNKGGKIVSSVHYGSRYNNAAWIGDQMIYGDGDGSFFSPLSGSMDVTAHEMTHGVTQETANLNYENQPGALNESFSDVFGYFNDTEDWDIGVDITVSQPALRSLSNPTKYGQPDNFKNYKNLPNTDAGDRGGVHTNSGIPNKAAYNTITKIGVNKAEQIYYRALTVYLTPSSTFKDAKAALIQSARDLYGSQDAASVEAAWNAVGL

SEQ ID NO: 71659 - protein, 300 aa, Bacillus amyloliquefaciens
AATTGTGTTLKGKTVSLNISSESGKYVLRDLSKPTGTQIITYDLQNREYNLPGTLVSSTTNQFTTSSQRAAVDAHYNLGKVYDYFYQKFNRNSYDNKGGKIVSSVHYGSRYNNAAWIGDQMIYGDGDGSFFSPLSGSMDVTAHEMTHGVTQETANLNYENQPGALNESFSDVFGYFNDTEDWDIGEDITVSQPALRSLSNPTKYGQPDNFKNYKNLPNTDAGDRGGVHTNSGIPNKAAYNTITKIGVNKAEQIYYRALTWYLTPSSTFKDAKAALIQSARDLYGSQDAASVEAAWNAVGL

SEQ ID NO: 71660 - protein, 300 aa, Bacillus amyloliquefaciens
AATTGTGTTLKGKTVSLNISSESGKYVLRDLSKPTGTQIITYDLQNREYNLPGTLVSSTTNQFTTSSQRAAVDAHYNLGKVYDYFYQKFNRNSYDNKGGKIVSSVHYGSRYNNAAWIGDQMIYGDGDGSFFSPLSGSMDVTAHEMTHGVTQETANLNYENQPGALNESFSDVFGYFNDTEDWDIGEDITVSQPALRSLSNPTKYGQPDNFKNYKNLPNTDAGDRGGVHTNSGIPNKAAYNTITKIGVNKAEQIYYRALTVYLTPSSTFKDAKAALIQSARDLYGSPDAASVEAAWNAVGL

SEQ ID NO: 71661 - protein, 300 aa, Bacillus amyloliquefaciens
AATTGTGTTLKGKTVSLNISSESGKYVLRDLSKPTGTQIITYDLQNREYNLPGTLVSSTTNQFTTSSQRAAVDAHYNLGKVYDYFYQKFNRNSYDNKGGKIVSSVHYGSRYNNAAWIGDQMIYGDGDGSFFSPLSLSMDVTAHEMTHGVTQETANLNYENQPGALNESFSDVFGYFNDTEDWDIGEDITVSQPALRSLSNPTKYGQPDNFKNYKNLPNTDAGDRGGVHTNSGIPNKAAYNTITKIGVNKAEQIYYRALTVYLTPSSTFKDAKAALIQSARDLYGSQDAASVEAAWNAVGL

SEQ ID NO: 71662 - protein, 300 aa, Bacillus amyloliquefaciens
AATTGTGTTLKGKTVSLNISSESGKYVLRDLSKPTGTQIITYDLQNREYNLPGTLVSSTTNQFTTSSQRAAVDAHYNLGKVYDYFYQKFNRNSYDNKGGKIVSSVHYGSRYNNAAWIGDQMIYGDGDGSFFSPLSGSMDVTAHEMTHGVTQETANLNYENQPGALNESFSDVFGYFNDTEDWDIGEDITVSQPALRSLSNPTKYGQPDNFKNYCNLPNTDAGDRGGVHTNSGIPNKAAYNTITKIGVNKAEQIYYRALTVYLTPSSTFKDAKAALIQSARDLYGSQDAASVEAAWNAVGL

SEQ ID NO: 71663 - protein, 300 aa, Bacillus amyloliquefaciens
AATTGTGTTLKGKTVLLNISSESGKYVLRDLSKPTGTQIITYDLQNREYNLPGTLVSSTTNQFTTSSQRAAVDAHYNLGKVYDYFYQKFNRNSYDNKGGKIVSSVHYGSRYNNAAWIGDQMIYGDGDGSFFSPLSGSMDVTAHEMTHGVTQETANLNYENQPGALNESFSDVFGYFNDTEDWDIGEDITVSQPALRSLSNPTKYGQPDNFKNYKNLPNTEAGDYGGVHTNSGIPNKAAYNTITKIGVNKAEQIYYRALTVYLTPWSTFKDAKAALIQSARDLYGSQDAASVEAAWNAVGL

SEQ ID NO: 71664 - protein, 300 aa, Bacillus amyloliquefaciens
AATTGTGTTLKGKTVSLNISSESGKYVLRDLSKPTGTQIITYDLQNREYNLPGTLVSSTTNQFTTSSQRAAVDAHYNLGKVYDYFYQKFNRNSYDNKGGKIVSSVHYGSRYNNAAWIGDQMIYGDGDGSFFSPLSGSMDVTAHEMTHGVTQETANLNYENQPGALNESFSDVFGYFNDTEDWDIGEDITVSQPALRSLSNPTKYGQPDNFKNYKNLPNTDAGDRGGVHTNSGIPNKAAYNTITKIGVNKAEQIYYRALTVYLTPQSTFKDAKAALIQSARDLYGSQDAASVEAAWNAVGL

SEQ ID NO: 71665 - protein, 300 aa, Bacillus amyloliquefaciens
AATTGTGTTLKGKTVSLNISSESGKYVLRDLSKPTGTQIITYDLQNREYNLPGTLVSSTTNQFTTSSQRAAVDAHYNLGKVYDYFYQKFNRNSYDNKGGKIVSSVHYGSRYNNAAWIGDQMIYGDGDGSFFSPLSGSMDVTAHEMTHGVTQETANLNYENQPGALNESFSDVFGYFNDTEDWDIGEDITVSQPALRSLSNPTKYGQPDNFKNYKNLPNTDAGDRGGVHTNSGIPNKAAYNTITKIGVNKAEQIYYRALTVYLTPSSTFKDAKAALIQSARDLYGSQDAASVEAAWEAVGL

SEQ ID NO: 71666 - protein, 300 aa, Bacillus amyloliquefaciens
AATVGTGTTLKGKTVSLNISSEYGKYVLRDLSKPTGTQIITYDLQNREYNLPGTLVSSTTNQFTTSSQRAAVDAHYNLGKVYDYFYQKFNRNSYDNKGGKIVSSVHYGSRYNNAAWIGDQMIYGDGDGSFFSPLSGSMDVTAHEMTHGVTQETANLNYENQPGALNESFSDVFGYFNDTEDWDIGEDITVSQPALRSLSNPTKYGQPDNFKNYKNLPNTDAGDYGGVHTNSGIPNKAAYNTITKIGVNKAEQIYYRALTVYLTPSSTFKDAKAALIQSARDLYGSQDAASVEAAWNAVGL

SEQ ID NO: 71667 - protein, 300 aa, Bacillus amyloliquefaciens
AATVGTGTTLKGKTVSLNISSESGKYVLRDLSKPTGTQIITYDLQNREYNLPGTLVSSTTNQFTTSSQRAAVDAHYNLGKVYDYFYQKFNRNSYDNKGGKIVSSVHYGSRYNNAAWIGDQMIYGDGDGSFFSPLSGSMDVTAHEMTHGVTQETANLNYENQPGALNESFSDVFGYFNDTEDWDIGEDITVSQPALRSLSNPTKYGQPDNFKNYKNLPNTDAGDRGGVHTNSGIPNKAAYNTITKIGVNKAEQIYYRALTVYLTPSSTFKDAKAALIQSARDLYGSQDAASVEAAWNAVGL

SEQ ID NO: 71668 - protein, 300 aa, Bacillus amyloliquefaciens
AATTGTGTTLKGKTVSLNISSESGKYVLRDLSKPTGTQIITYDLQNREYNLPGTLVSSTTNQFTTSSQRAAVDAHYNLGKVYDYFYQKFNRNSYDNKGGKIVSSVHYGSRYNNAAWIGDQMIYGDGDGSFFSPLSGSMDVTAHEMTHGVTQWTANLNYENQPGALNESFSDVFGYFNDPEDWDIGEDITVSQPALRSLSNPTKYGQPDNFKNYKNLPNTDAGDYGGVHTNSGIPNKAAYNTITKIGVNKAEQIYYRALTVYLTPSSTFKDAKAALIQSARDLYGSQDAASVEAAWNAVGL

SEQ ID NO: 71669 - protein, 300 aa, Bacillus amyloliquefaciens
AATTGTGTTLKGKTVSLNISSESGKYVLRDLSKPTGTQIITYDLQNREYFLPGKLVSSTTNQFTTSSQRAAVDAHYNLGKVYDYFYQKFNRNSYDNKGGKIVSSVHYGSRYNNAAWIGDQMIYGDGDGSFFSPLSGSMDVTAHEMTHGVTQETANLNYENQPGALNESFSDVFGYFNDTEDWDIGEDITVSQPALRSLSNPTKYGQPDNFKNYKNLPNTDAGDYGGVHTNSGIPNKAAYNTITKIGVNKAEQIYYRALTVYLTPSSTFKDAKAALIQSARDLYGSQDAASVEAAWNAVGL

SEQ ID NO: 71670 - protein, 300 aa, Bacillus amyloliquefaciens
AATTGTGTTLKGKTVSLNISSESGKYVLRDLSKPTGTQIITYDLQNREYNLPGTLVSSTTNQFTTSSQRAAVDAHYNLGKVYDYFYQKFNRNSYDNKGGKIVSSVHYGSRYNNAAWIGDQMIYGDGDGSFFSPLSGSMDVTAHEMTHGVTQETANLNYENQPGALNESFSDVFGYFNDTEDWDIGEDITVSQPALRSLSNPTKYGQPDNFKNYKNLPNTDAGDRGGVHTNSGIPNKAAYNTITKIGVNKAEQIYYRALTVYLTPSSTFKDAKAALIQSARDLYGSQDAASVEAAWCAVGL

SEQ ID NO: 71671 - protein, 300 aa, Bacillus amyloliquefaciens
AATTGTGTTLKGKTVSLNISSESGKYVLRDLSKPTGTQIITYDLQNREYNLPGTLVSSTTNQFTTSSQRAAVDAHYNLGKVYDYFYQKFNRNSYDNKGGKIVSSVHYGSRYNNAAWIGDQMIYGDGDGSFFSPLSGSMDVTAHEMTHGVTQETANLNYENQPGALNESFSDVFGYFNDTEDWDIGEDITVSQPALRSLSNPTKYGQPDNFKNYKNLPNTDAGDRGGVHTNSGIPNKAAYNTITKIGVNKAEQIYYRALTVYLTPSSTFKDAKAALIQSARDLYGSDDAASVEAAWNAVGL

SEQ ID NO: 71672 - protein, 300 aa, Bacillus amyloliquefaciens
AATSGTGTTLKGKTVSLNISSENGKYVLRDLSKPTGTQIITYDLQNREYNLPGTLVSSTTNQFTTSSQRAAVDAHYNLGKVYDYFYQKFNRNSYDNKGGKIVSSVHYGSRYNNAAWIGDQMIYGDGDGSFFSPLSGSMDVTAHEMTHGVTQETANLNYENQPGALNESFSDVFGYFNDTEDWDIGEDITVSQPALRSLSNPTKYGQPDNFKNYKNLPNTDAGDYGGVHTNSGIPNKAAYNTITKIGVNKAEQIYYRALTVYLTPSSTFKDAKAALIQSARDLYGSQDAASVEAAWNAVGL

SEQ ID NO: 71673 - protein, 300 aa, Bacillus amyloliquefaciens
AATTGTGTTLKGKTVSLNISSESGKYVLRDLSKPTGTQIITYDLQNREYNLPGTLVSSSTNQFTTSSQRAAVDAHYNLGKVYDYFYQKFNRNSYDNKGGKIVSSVHYGSRYNNAAWIGDQMIYGDGDGSFFSPLSGSMDVTAHEMTHGVTQETANLNYENQPGALNESFSDVFGYFNDTEDWDIGEDITVSQPALRSLSNPTKYGQPDNFKNYKNLPNTDAGDRGGVHTNSGIPNKAAYNTITKIGVNKAEQIYYRALTVYLTPSSTFKDAKAALIQSARDLYGSQDAASVEAAWNAVGL

SEQ ID NO: 71674 - protein, 300 aa, Bacillus amyloliquefaciens
AATTGTGTTLKGKTVSLNISSESGKYVLRDLSKPTGTQIITYDLQNREYNLPGTLVSSTTNQFTTSSQRAAVDAHYNLGKVYDYFYQKFNRNSYDNKGGKIVSSVHYGSRYNNAAWIGDQMIYGDGDGSFFSPLSGSMDVTAHEMTHGVTQETANLNYENQPGALNESFSDVFGYFNDTEDWDIGEDITVSQPALRSLSNPTKYGQPDNFKNYANLPNTDAGDRGGVHTNSGIPNKAAYNTITKIGVNKAEQIYYRALTVYLTPSSTFKDAKAALIQSARDLYGSQDAASVEAAWNAVGL

SEQ ID NO: 71675 - protein, 300 aa, Bacillus amyloliquefaciens
AATTGTGTTLKGKTVSLNISSESGKYVLRDLSKPTGTQIITYDLQNREYNLPGTLVSSTTNQFTTSSQRAAVDAHYNLGKVYDYFYQKFNRNSYDNKGGKIVSSVHYGSRYNNAAWIGDQMIYGDGDGSFFSPLSGSMDVTAHEMTHGVTQETANLYYENQPGALNESFSDVFGYFNDTEDWDIGEDITVSQPALRSLSNPTKYGQPDNFKNYKNLPNTDAGDYGGVHTNSGIPNKAAYNTITKIGVNKAEQIYYRALTVYLTPSSTFKDAKAALIQSARDLYGWQDAASVEAAWNAVGL

SEQ ID NO: 71676 - protein, 300 aa, Bacillus amyloliquefaciens
AATTGTGTTLKGKTVSLNISSESGKYVLRDLSKPTGTQIITYDLQNREYNLPGTLVSSTTNQFTTSSQRAAVDAHYNLGKVYDYFYQKFNRNSYDNKGGKIVSSVHYGSRYNNAAWIGDQMIYGDGDGSFFSPLSGSMDVTAHEMTHGVTQETANLNYENQPGALNESFSDVFGYFNDTEDWDIGEDITVSQPALRSLSNPTKYGQPDNFKNYKNLPNTDAGDRGGVHTNSGIPNKAAYNTITKIGVNKAEQIYYRALTMYLTPSSTFKDAKAALIQSARDLYGSQDAASVEAAWNAVGL

SEQ ID NO: 71677 - protein, 300 aa, Bacillus amyloliquefaciens
AATTGTGTTLKGKTVSLNISSESGKYVLRDLSKPTGTQIITYDLQNREYWLPGLLVSSTTNQFTTSSQRAAVDAHYNLGKVYDYFYQKFNRNSYDNKGGKIVSSVHYGSRYNNAAWIGDQMIYGDGDGSFFSPLSGSMDVTAHEMTHGVTQETANLNYENQPGALNESFSDVFGYFNDTEDWDIGEDITVSQPALRSLSNPTKYGQPDNFKNYKNLPNTDAGDYGGVHTNSGIPNKAAYNTITKIGVNKAEQIYYRALTVYLTPSSTFKDAKAALIQSARDLYGSQDAASVEAAWNAVGL

SEQ ID NO: 71678 - protein, 300 aa, Bacillus amyloliquefaciens
AATTGTGTTLKGKTVSLNISSESGKYVLRDLSKPTGTQIITYDLQNREYWLPGKLVSSTTNQFTTSSQRAAVDAHYNLGKVYDYFYQKFNRNSYDNKGGKIVSSVHYGSRYNNAAWIGDQMIYGDGDGSFFSPLSGSMDVTAHEMTHGVTQETANLNYENQPGALNESFSDVFGYFNDTEDWDIGEDITVSQPALRSLSNPTKYGQPDNFKNYKNLPNTDAGDYGGVHTNSGIPNKAAYNTITKIGVNKAEQIYYRALTVYLTPSSTFKDAKAALIQSARDLYGSQDAASVEAAWNAVGL

SEQ ID NO: 71679 - protein, 300 aa, Bacillus amyloliquefaciens
AATTGTGTTLKGVTVSLNISSESGKYVLRDLSKPTGTQIITYDLQNREYNLPGTLVSSTTNQFTTSSQRAAVDAHYNLGKVYDYFYQKFNRNSYDNKGGKIVSSVHYGSRYNNAAWIGDQMIYGDGDGSFFSPLSGSMDVTAHEMTHGVTQETANLNYENQPGALNESFSDVFGYFNDTEDWDIGEDITVSQPALRSLSNPTKYGQPDNFKNYKNLPNTDAGDRGGVHTNSGIPNKAAYNTITKIGVNKAEQIYYRALTVYLTPSSTFKDAKAALIQSARDLYGSQDAASVEAAWNAVGL

SEQ ID NO: 71680 - protein, 300 aa, Bacillus amyloliquefaciens
AATTGTGTTLKGKTVSLNISSESGKYVLRDLSKPTGTQIITYDLMNREYNLPGTLVSSTTNQFTTSSQRAAVDAHYNLGKVYDYFYQKFNRNSYDNKGGKIVSSVHYGSRYNNAAWIGDQMIYGDGDGSFFSPLSGSMDVTAHEMTHGVTQETANLNYENQPGALNESFSDVFGYFNDTEDWDIGEDITVSQPALRSLSNPTKYGQPDNFKNYKNLPNTDAGDRGGVHTNSGIPNKAAYNTITKIGVNKAEQIYYRALTVYLTPSSTFKDAKAALIQSARDLYGSQDAASVEAAWNAVGL

SEQ ID NO: 71681 - protein, 300 aa, Bacillus amyloliquefaciens
AATTGTGTTLKGKTVSLNISSESGKYVLRDLSKPTGTQIITYDLQNREYNLPGTLVSSTTNQFTTSSQRAAVDAHYNLGKVYDYFYQKFNRNSYDNKGGKIVSSVHYGSMYNNAAWIGDQMIYGDGDGSFFSPLSGSMDVTAHEMTHGVTQETANLNYENQPGALNESFSDVFGYFNDTEDWDIGEDITVSQPALRSLSNPTKYGQPDNFKNYKNLPNTDAGDRGGVHTNSGIPNKAAYNTITKIGVNKAEQIYYRALTVYLTPSSTFKDAKAALIQSARDLYGSQDAASVEAAWNAVGL

SEQ ID NO: 71682 - protein, 300 aa, Bacillus amyloliquefaciens
AATTGTGTTLKGKTVSLNISSESGKYVLRDLSKPTGTQIITYDLQNREYNLPGTLVSSTTNQFTTSSQRAAVDAHYNLGKVYDYFYQKFNRNSYDNKGGKIVSSVHYGSRYNNAAWIGDQMIYGDGDGSFFSPLSGSMDVTAHEMTHGVTQETANLNYENQPGALNESFSDVFGYFNDTEDWDIGEDITVSQPALRSLSNPTKYGQPDNFKNYKNLPNTDAGDRGGVHTNSGIPNKAAYNTITKIGVNKAEQIYYRALTLYLTPSSTFKDAKAALIQSARDLYGSQDAASVEAAWNAVGL

SEQ ID NO: 71683 - protein, 300 aa, Bacillus amyloliquefaciens
AATTGTGTTLKGKTVSLNISSESGKYVLRDLSKPTGTQIITYDLQNREYNLPGTLVSSTTNQFTTSSQRAAVDAHYNLGKVYDYFYQKFNRNSYDNKGGKIVSSVHYGSRYNNAAWIGDQMIYGDGDGSFFSPLSGSMDVTAHEMTHGVTQETANLNYENQPGALNESFSDVFGYFNDTEDWDIGEDITVSQPALRSLSNPTKYGQPDNFKNYKNAPNTDAGDRGGVHTNSGIPNKAAYNTITKIGVNKAEQIYYRALTVYLTPSSTFKDAKAALIQSARDLYGSQDAASVEAAWNAVGL

SEQ ID NO: 71684 - protein, 300 aa, Bacillus amyloliquefaciens
AATTGTGTTLKGKTVSLNISSESGKYVLRDLSKPTGTQIITYDLQNREYNLPGTLVSSKTNQFTTQSQRAAVDAHYNLGKVYDYFYQKFNRNSYDNKGGKIVSSVHYGSRYNNAAWIGDQMIYGDGDGSFFSPLSGSMDVTAHEMTHGVTQETANLNYENQPGALNESFSDVFGYFNDTEDWDIGEDITVSQPALRSLSNPTKYGQPDNFKNYKNLPNTDAGDYGGVHTNSGIPNKAAYNTITKIGVNKAEQIYYRALTVYLTPSSTFKDAKAALIQSARDLYGSQDAASVEAAWNAVGL

SEQ ID NO: 71685 - protein, 300 aa, Bacillus amyloliquefaciens
AATTGTGTTLKGKTVSLNISSESGKYVLRDLSKPTGTQIITYDLQNREYNLPGTLVSSTTNQFTTSSQRAAVDAHYNLGKVYDYFYQKFNRNSYDNKGGKIVSSVHYGSRYNNAAWIGDQMIYGDGDGSFFSPLSGSMDVTAHEMTHGVTQETANLNYENQPGALNESFSDVFGYFNDTEDWDIGEDITVSQPALRSLSNPTKYGQPDNFKNYKNLPNTDAGDRGGVHTNSGIPNKAAYNTITKIGVNKAEQIYYRALTVYLTPSSTFKDAKAALIQSARDLYGQQDAASVEAAWNAVGL

SEQ ID NO: 71686 - protein, 300 aa, Bacillus amyloliquefaciens
AATTGTGTTLKGKTVSLNISSESGKYVLRDLSKPTGTQIITYDLQNREYNLPGTLVSSWTNQFTTNSQRAAVDAHYNLGKVYDYFYQKFNRNSYDNKGGKIVSSVHYGSRYNNAAWIGDQMIYGDGDGQFFSPLSGSMDVTAHEMTHGVTQETANLNYENQPGALNESFSDVFGYFNDTEDWDIGEDITVSQPALRSLSNPTKYGQPDNFKNYKNLPNTDAGDYGGVHTNSGIPNKAAYNTITKIGVNKAEQIYYRALTVYLTPSSTFKDAKAALIQSARDLYGSQDAASVEAAWNAVGL

SEQ ID NO: 71687 - protein, 300 aa, Bacillus amyloliquefaciens
AATTGTGTTLKGKTVSLNISSESGKYVLRDLSKPTGTQIITYDLQNREYNLPGTLVSSTTNQFTTSSQRAAVDAHYNLGKVYDYFYQKFNRNSYDNKGGKIVSSVHYGSHYNNAAWIGDQMIYGDGDGSFFSPLSGSMDVTAHEMTHGVTQETANLNYENQPGALNESFSDVFGYFNDTEDWDIGEDITVSQPALRSLSNPTKYGQPDNFKNYKNLPNTDAGDRGGVHTNSGIPNKAAYNTITKIGVNKAEQIYYRALTVYLTPSSTFKDAKAALIQSARDLYGSQDAASVEAAWNAVGL

SEQ ID NO: 71688 - protein, 300 aa, Bacillus amyloliquefaciens
AATTGTGTTLKGKTVSLNISSESGKYVLRDLSKPTGTQIITYDLQNREYNLPGTLVSSKTNQFTTQSQRAAVDAHYNLGKVYDYFYQKFNRNSYDNKGGKIVSSVHYGSRYNNAAWIGDQMIYGDGDGQFFSPLSGSMDVTAHEMTHGVTQETANLNYENQPGALNESFSDVFGYFNDTEDWDIGEDITVSQPALRSLSNPTKYGQPDNFKNYKNLPNTDAGDYGGVHTNSGIPNKAAYNTITKIGVNKAEQIYYRALTVYLTPSSTFKDAKAALIQSARDLYGSQDAASVEAAWNAVGL

SEQ ID NO: 71689 - protein, 300 aa, Bacillus amyloliquefaciens
AATTGTGTTLKGKTVSLNISSESGKYVLRDLSKPTGTQIITYDLQNREYNLPGTLVSSTTNQFTTSSQRAAVDAHYNLGKVYDYFYQKFNRNSYDNKGGKIVSSVHYGSRYNNAAWIGDQMIYGDGDGSFFSPLSGSMDVTAHEMTHGVTQETANLNYENQPGALNESFSDVFGYFNDTEDWDIGEDITVSQPALRSLSNPTKYGQPDNFKNYKNLPNTDAGDRGGVHTNSGIPNKAAYNTITKIGVNKAEQIYYRALTVYLFPSSTFKDAKAALIQSARDLYGSQDAASVEAAWNAVGL

SEQ ID NO: 71690 - protein, 300 aa, Bacillus amyloliquefaciens
AATTGTGTTLKGKTVSLNISSESGKYVLRDLSKPTGTQIITYDLQNREYNLPGTLVSSTTNQFTTSSQRAAVDAHYNLGKVYDYFYQKFNRNSYDNKGGKIVSSVHYGSRYNNAAWIGDQMIYGDGDGSFFSPLSGSMDVTAHEMTHGVTQETANLNYENQPGALNESFSDVFGYFNDTEDWDIGEDITVSQPALRSLSNPTKYGQPDNFKNYKNLPNTDAGDRGGVHTNSGIPNKAAYNTITKIGVNKAEQIYYRALTVYLTPASTFKDAKAALIQSARDLYGSQDAASVEAAWNAVGL

SEQ ID NO: 71691 - protein, 300 aa, Bacillus amyloliquefaciens
AATTGTGTTLKGKTVSLNISSESGKYVLRDLSKPTGTQIITYDLQNREYNLPGTLVSSTTNQFTTSSQRAAVDAHYNLGKVYDYFYQKFNRNSYDNKGGKIVSSVHYGSRYNNAAWIGDQMIYGDGDGSFFSPLSGSMDVTAHEMTHGVTQETANLNYENQPGALNESFSDVFGYFNDTEDWDIGEDITVSQPALRSLSNPTKYGQPDNFKNYKNLPNTDAGDRGGVHTNSGIPNKAAYNTITKIGVNKAEQIYYRALTVYLTPSSTFKDAKAALIQSARDLYGSQDAKSVEAAWNAVGL

SEQ ID NO: 71692 - protein, 300 aa, Bacillus amyloliquefaciens
AATTGTGTTLKGKTVSLNISSESGKYVLRDLSKPTGTQIITYDLQNREYNLPGTLVSSTTNQFTTSSQRAAVDAHYNLGKVYDYFYQKFNRNSYDNKGGKIVSSVHYGSRYNNAAWIGDQMIYGDGDGSFFSPLSGSMDVTAHEMTHGVTQETANLNYENQPGALNESFSDVFGYFNDTEDWDIGEDITVSQPALRSLSNPTKTGQPDNFKNYKNLPNTDAGDRGGVHTNSGIPNKAAYNTITKIGVNKAEQIYYRALTVYLTPSSTFKDAKAALIQSARDLYGSQDAASVEAAWNAVGL

SEQ ID NO: 71693 - protein, 300 aa, Bacillus amyloliquefaciens
AATTGTGTTLKGKTVSLNISSESGKYVLRDLSKPTGTQIITYDLQNREYWLPGHLVSSTTNQFTTSSQRAAVDAHYNLGKVYDYFYQKFNRNSYDNKGGKIVSSVHYGSRYNNAAWIGDQMIYGDGDGSFFSPLSGSMDVTAHEMTHGVTQETANLNYENQPGALNESFSDVFGYFNDTEDWDIGEDITVSQPALRSLSNPTKYGQPDNFKNYKNLPNTDAGDYGGVHTNSGIPNKAAYNTITKIGVNKAEQIYYRALTVYLTPSSTFKDAKAALIQSARDLYGSQDAASVEAAWNAVGL

SEQ ID NO: 71694 - protein, 300 aa, Bacillus amyloliquefaciens
AATTGTGTTLKGKTVSLNISSESGKYVLRDLSKPTGTQIITYDLQNREYNLPGTLVSSTTNQFTTSSQRAAVDAHYNLGKVYDYFYQKFNRNSYDNKGGKIVSSVHYGSRYNNAAWIGDQMIYGDGDGSIFSPLSGSMDVTAHEMTHGVTQHTANLNYENQPGALNESFSDVFGYFNDPEDWDIGEDITVSQPALRSLSNPTKYGQPDNFKNYKNLPNTDAGDYGGVHTNSGIPNKAAYNTITKIGVNKAEQIYYRALTVYLTPSSTFKDAKAALIQSARDLYGSQDAASVEAAWNAVGL

SEQ ID NO: 71695 - protein, 300 aa, Bacillus amyloliquefaciens
AATTGTGTTLKGKTVSLNISSESGKYVLRDLSKPTGTQIITYDLQNMEYNLPGTLVSSTTNQFTTSSQRAAVDAHYNLGKVYDYFYQKFNRNSYDNKGGKIVSSVHYGSRYNNAAWIGDQMIYGDGDGSFFSPLSGSMDVTAHEMTHGVTQETANLNYENQPGALNESFSDVFGYFNDTEDWDIGEDITVSQPALRSLSNPTKYGQPDNFKNYKNLPNTDAGDRGGVHTNSGIPNKAAYNTITKIGVNKAEQIYYRALTVYLTPSSTFKDAKAALIQSARDLYGSQDAASVEAAWNAVGL

SEQ ID NO: 71696 - protein, 300 aa, Bacillus amyloliquefaciens
AATTGTGTTLKGKTVSLNISSESGKYVLRDLSKPTGTQIITYDLQNREYNLPGTLVSSETNQFTTSSQRAAVDAHYNLGKVYDYFYQKFNRNSYDNKGGKIVSSVHYGSRYNNAAWIGDQMIYGDGDGSFFSPLSGSMDVTAHEMTHGVTQETANLNYENQPGALNESFSDVFGYFNDTEDWDIGEDITVSQPALRSLSNPTKYGQPDNFKNYKNLPNTDAGDRGGVHTNSGIPNKAAYNTITKIGVNKAEQIYYRALTVYLTPSSTFKDAKAALIQSARDLYGSQDAASVEAAWNAVGL

SEQ ID NO: 71697 - protein, 300 aa, Bacillus amyloliquefaciens
AATTGTGTTLKGKTVSLNISSESGKYVLRDLSKPTGTQIITYDLQVREYNLPGTLVSSTTNQFTTSSQRAAVDAHYNLGKVYDYFYQKFNRNSYDNKGGKIVSSVHYGSRYNNAAWIGDQMIYGDGDGSFFSPLSGSMDVTAHEMTHGVTQETANLNYENQPGALNESFSDVFGYFNDTEDWDIGEDITVSQPALRSLSNPTKYGQPDNFKNYKNLPNTDAGDRGGVHTNSGIPNKAAYNTITKIGVNKAEQIYYRALTVYLTPSSTFKDAKAALIQSARDLYGSQDAASVEAAWNAVGL

SEQ ID NO: 71698 - protein, 300 aa, Bacillus amyloliquefaciens
AATTGTGTTLKGKTVSLNISSESGKYVLRDLSKPTGTQIITYDLQNREYNLPGTLVSSTTNQFTTSSQRAAVDAHYNLGKVYDYFYQKFNRNSYDNKGGKIVSSVHYGSRYNNAAWIGDQMIYGDGDGSFFSPLSGSMDVTAHEMTHGVTQETANLNYENQPGALNESFSDVFGYFNDTEDWDIGEDITVSQPALRSLSNPTKYGQPDNFKNYKNLPNTDAGDRGGVHTNSGIPNKAAYNTITKIGVNKAEQIYYRALTVYLTPSSTFKDAKAALIQSALDLYGSQDAASVEAAWNAVGL

SEQ ID NO: 71699 - protein, 300 aa, Bacillus amyloliquefaciens
AATCGTGTTLKGKTVSLNISSESGKYVLRDLSKPTGTQIITYDLQNREYNLPGTLVSSTTNQFTTSSQRAAVDAHYNLGKVYDYFYQKFNRNSYDNKGGKIVSSVHYGSRYNNAAWIGDQMIYGDGDGSFFSPLSGSMDVTAHEMTHGVTQETANLNYENQPGALNESFSDVFGYFNDTEDWDIGEDITVSQPALRSLSNPTKYGQPDNFKNYKNLPNTDAGDRGGVHTNSGIPNKAAYNTITKIGVNKAEQIYYRALTVYLTPSSTFKDAKAALIQSARDLYGSQDAASVEAAWNAVGL

SEQ ID NO: 71700 - protein, 300 aa, Bacillus amyloliquefaciens
AATTGTGTTLKGKTVSLNISSESGKYVLRDLSKPTGTQIITYDLQNREYNLPGTLVSSTTNQFTTSSQRAAVDAHYNLGKVYDYFYQKFNRNSYDNKGGKIVSSVHYGSRYNNAAWIGDQMIYGDGDGSFFSPLSGSMDVTAHEMTHGVTQETANLNYENQPGALNESFSDVFGYFNDTEDWDIGEDITVSQPALRSLSNPTKYGQPDNFKNYKNLPNTDAGDRGGVHTNSGIPNKAAYNTITKIGVNKAEQIYYRALTVYLTPSSTFKDAKRALIQSARDLYGSQDAASVEAAWNAVGL

SEQ ID NO: 71701 - protein, 300 aa, Bacillus amyloliquefaciens
AATTGTGTTLKGKTVSLNISSESGKYVLRDLSKPTGTQIITYDLQNREYNLPGTLVSSTTNQFTTSSQRAAVDAHYNLGKVYDYFYQKFNRNSYDNKGGKIVSSVHYGSRYNNAAWIGDQMIYGDGDGSFFSPLSGSMDVTAHEMTHGVTQETANLNYENQPGALNESFSDVFGYFNDTEDWDIGEDITVSQPALRSLSNPTKYGQPDNFKNYKNLPNTDAGDYGGVHINSGIPNKAAYNTITKIGVNKAEQIYYRALTVYLTPSSTFTDAKAALIQSARDLYGSQDAASVEAAWNAVGL

SEQ ID NO: 71702 - protein, 300 aa, Bacillus amyloliquefaciens
AATTGTGTTLKGKTVSLNISSESGKYVLRDLSKPTGTQIITYDLQNREYNLPGTLVSSTTNQFTTSSQRAAVDAHYNLGKVYDYFYQKFNRNSYDNKGGKIVSSVHYGSRYNNAAWIGDQMIYGDGDGSFFSPLSGSMDVTAHEMTHGVTQETANLNYENQPGALNESFSDVFGYFNDTEDWDIGEDITVSQPALRSLSNPTKYGQPDNFKNYKNLPNTDAGDRGGVHTNSGIPNKAAYNTITQIGVNKAEQIYYRALTVYLTPSSTFKDAKAALIQSARDLYGSQDAASVEAAWNAVGL

SEQ ID NO: 71703 - protein, 300 aa, Bacillus amyloliquefaciens
AATSGTGTTLKGKTVSLNISSESYKYVLRDLSKPTGTQIITYDLQNREYNLPGTLVSSTTNQFTTSSQRAAVDAHYNLGKVYDYFYQKFNRNSYDNKGGKIVSSVHYGSRYNNAAWIGDQMIYGDGDGSFFSPLSGSMDVTAHEMTHGVTQETANLNYENQPGALNESFSDVFGYFNDTEDWDIGEDITVSQPALRSLSNPTKYGQPDNFKNYKNLPNTDAGDYGGVHTNSGIPNKAAYNTITKIGVNKAEQIYYRALTVYLTPSSTFKDAKAALIQSARDLYGSQDAASVEAAWNAVGL

SEQ ID NO: 71704 - protein, 300 aa, Bacillus amyloliquefaciens
AATTGTGTTLKGKTVSLNISSESGKYVLRDLSKPTGTQIITYDLQNREYNLPGTLVSSTTNQFTTSSQRAAVDAHYNLGKVYDYFYQKFNRNSYDNKGGKIVSSVHYGSRYNNAAWIGDQMIYGDGDGSFFSPLSGSMDVTAHEMTHGVTQETANLNYENQPGALNESFSDVFGYFNDTEDWDIGEDITVSQPALRSLSNPTKYGQPDNFKNYKNLPNTDAGDRGGVHTNSGIPNKAAYNTITNIGVNKAEQIYYRALTVYLTPSSTFKDAKAALIQSARDLYGSQDAASVEAAWNAVGL

SEQ ID NO: 71705 - protein, 300 aa, Bacillus amyloliquefaciens
AATTGTGTTLKGKTVSLNISSESGKYVLRDLSKPTGTQIITYDLQNREYYLPGHLVSSTTNQFTTSSQRAAVDAHYNLGKVYDYFYQKFNRNSYDNKGGKIVSSVHYGSRYNNAAWIGDQMIYGDGDGSFFSPLSGSMDVTAHEMTHGVTQETANLNYENQPGALNESFSDVFGYFNDTEDWDIGEDITVSQPALRSLSNPTKYGQPDNFKNYKNLPNTDAGDYGGVHTNSGIPNKAAYNTITKIGVNKAEQIYYRALTVYLTPSSTFKDAKAALIQSARDLYGSQDAASVEAAWNAVGL

SEQ ID NO: 71706 - protein, 300 aa, Bacillus amyloliquefaciens
AATTGTGTTLKGLTVSLNISSESGKYVLRDLSKPTGTQIITYDLQNREYNLPGTLVSSTTNQFTTSSQRAAVDAHYNLGKVYDYFYQKFNRNSYDNKGGKIVSSVHYGSRYNNAAWIGDQMIYGDGDGSFFSPLSGSMDVTAHEMTHGVTQETANLNYENQPGALNESFSDVFGYFNDTEDWDIGEDITVSQPALRSLSNPTKYGQPDNFKNYKNLPNTDAGDRGGVHTNSGIPNKAAYNTITKIGVNKAEQIYYRALTVYLTPSSTFKDAKAALIQSARDLYGSQDAASVEAAWNAVGL

SEQ ID NO: 71707 - protein, 300 aa, Bacillus amyloliquefaciens
AATTGTGTTLKGKTVSLNISSESGKYVLRDLSKPTGTQIITYDLQNREYNLPGTLVSSTTNQFTTSSQRAAVDAHYNLGKVYDYFYQKFNRNSYDNKGGKIVSSVHYGSRYNNAAWIGDQMIYGDGDGSFFSPLSGSMPVTAHEMTHGVTQETANLNYENQPGALNESFSDVFGYFNDTEDWDIGEDITVSQPALRSLSNPTKYGQPDNFKNYKNLPNTDAGDRGGVHTNSGIPNKAAYNTITKIGVNKAEQIYYRALTVYLTPSSTFKDAKAALIQSARDLYGSQDAASVEAAWNAVGL

SEQ ID NO: 71708 - protein, 300 aa, Bacillus amyloliquefaciens
AATTGTGTTLKGKTVSLNISSESGKYVLRDLSKPTGTQIITYDLQNREYNLPGTLVSSRTNQFTTNSQRAAVDAHYNLGKVYDYSYQKFNRNSYDNKGGKIVSSVHYGSRYNNAAWIGDQMIYGDGDGIFFSPLSGSMDVTAHEMTHGVTQETANLNYENQPGALNESFSDVFGYFNDTEDWDIGEDITVSQPALRSLSNPTKYGQPDNFKNYKNLPNTDAGDYGGVHTNSGIPNKAAYNTITKIGVNKAEQIYYRALTVYLTPSSTFKDAKAALIQSARDLYGSQDAASVEAAWNAVGL

SEQ ID NO: 71709 - protein, 300 aa, Bacillus amyloliquefaciens
AATTGTGTTLKGTTVSLNISSESGKYVLRDLSKPTGTQIITYDLQNREYNLPGTLVSSTTNQFTTSSQRAAVDAHYNLGKVYDYFYQKFNRNSYDNKGGKIVSSVHYGSRYNNAAWIGDQMIYGDGDGSFFSPLSGSMDVTAHEMTHGVTQETANLNYENQPGALNESFSDVFGYFNDTEDWDIGEDITVSQPALRSLSNPTKYGQPDNFKNYKNLPNTDAGDRGGVHTNSGIPNKAAYNTITKIGVNKAEQIYYRALTVYLTPSSTFKDAKAALIQSARDLYGSQDAASVEAAWNAVGL

SEQ ID NO: 71710 - protein, 300 aa, Bacillus amyloliquefaciens
AATTGTGTTLKGKTVSLNISSESGKYVLRDLSKPTGTQIITYDLQNREYNLPGTLVSSTTNQFTTSSQRAAVDAHYNLGKVYDYFYQKFNRNSYDNKGGKIVSSVHYGSRYNNAAWIGDQMIYGDGDGSFFSPLSGSMDVTAHEMTHGVTQETANLNYENQPGALNESFSDVFGYFNDTEDWDIGEDITVSQPALRSLSNPTKYGQPDNFKNYKNLPNTDAGDRGGVHTNSGIPNKAAYNTITKIGVNKAEQIYYRALTVYLTPSSTFKDAKAALIQSARDLYGSQDAASVECAWNAVGL

SEQ ID NO: 71711 - protein, 300 aa, Bacillus amyloliquefaciens
AATTGTGTTLKGKTVSLNISSESGKYVLRDLSKPTGTQIITYDLQNREYNLPGTLVSSTTNQFTTSSQRAAVDAHYNLGKVYDYFYQKFNRNSYDNKGGKIVSSVHYGSRYNNAAWIGDQMIYGDGDGSFFSPLSGSMDVTAHEMTHGVTQETANLNYENQPGALNESFSDVFGYFNDTEDWDIGEDITVSQPALRSLSNPTKYGQPDNFKNYKNLPNTDAGDRGGVHTNSGIPNKAAYNTIQKIGVNKAEQIYYRALTVYLTPSSTFKDAKAALIQSARDLYGSQDAASVEAAWNAVGL

SEQ ID NO: 71712 - protein, 300 aa, Bacillus amyloliquefaciens
AATTGTGTTLKGKTVSLNISSESGKYVLRDLSKPTGTQIITYDLQNREYNLPGTLVSSTTNQFTTSSQRAAVDAHYNLGKVYDYFYQKFNRNSYDNKGGKIVSSVHYGSRYNNAAWIGDQMIYGDGDGSFFSPLSGSMDVTAHEMTHGVTQETANLNYENQPGALNESFSDVFGYFNDTEDWDIGEDITVSQPALRSLSNPTKYGQPDNFKNYKNLPNTDAGDRGGVHTNSGIPNKAAYNTITKIGVNKAEQIYYRALTVYLTPSSTFKDAKAALIQSARDLYGSQDAASVEAAWNRVGL

SEQ ID NO: 71713 - protein, 300 aa, Bacillus amyloliquefaciens
AATTGTGTTLKGKTVSLNISSESGKYVLRDLSKPTGTQIITYDLQNREYNLPGTLVSSTTNQFTTSSQRAAVDAHYNLGKVYDYFYQKFNRNSYDNKGGKIVSSVHYGSRYNNAAWIGDQMIYGDGDGSFFSPLSGSMDVTAHEMTHGVTQETANLNYENQPGALNESFSDVFGYFNDTEDWDIGEDITVSQPALRSLSNPTKYGQPDNFKNYKNLPNTDAGDRGGVHTNSGIPNKAAYNTITKIGVNKAEQIYYRALTVYLTPSSTFKDAKAALIQSADDLYGSQDAASVEAAWNAVGL

SEQ ID NO: 71714 - protein, 300 aa, Bacillus amyloliquefaciens
AATTGTGTTLKGKTVSLNISSESGKYVLRDLSKPTGTQIITYDLQNREYNLPGTLVSSTTNQFTTSSQRAAVDAHYNLGKVYDYFYQKFNRNSYDNKGGKIVSSVHYGSRYNNAAWIGDQMIYGDGDGSFFSPLSGSMDVTAHEMTHGVTQETANLNYENQPGALNESFSDVFGYFNDTEDWDIGEDITVSQPALRSLSNPTKYGQPDNFKNYKNLPNTDEGDRGGVHTNSGIPNKAAYNTITKIGVNKAEQIYYRALTVYLTPSSTFKDAKAALIQSARDLYGSQDAASVEAAWNAVGL

SEQ ID NO: 71715 - protein, 300 aa, Bacillus amyloliquefaciens
AATTGTGTTLKGKTVSLNISSESGKYVLRDLSKPTGTQIITYDLQNREYNLPGTLVSSRTNQFTTQSQRAAVDAHYNLGKVYDYFYQKFNRNSYDNKGGKIVSSVHYGSRYNNAAWIGDQMIYGDGDGSFFSPLSGSMDVTAHEMTHGVTQETANLNYENQPGALNESFSDVFGYFNDTEDWDIGEDITVSQPALRSLSNPTKYGQPDNFKNYKNLPNTDAGDYGGVHTNSGIPNKAAYNTITKIGVNKAEQIYYRALTVYLTPSSTFKDAKAALIQSARDLYGSQDAASVEAAWNAVGL

SEQ ID NO: 71716 - protein, 300 aa, Bacillus amyloliquefaciens
AATTGTGTTLKGKTVSLNISSESGKYVLRDLSKPTGTQIITYDLQNREYNLPGTLVSSTTNQFTTSSQRAAVDAHYNLGKVYDYFYQKFNRNSYDNKGGKIVSSVHYGSRYNNAAWIGDQMIYGDGDGSFFSPLSGSMDVTAHEMTHGVTQETANLNYENQPGALNESFSDVFGYFNDTEDWDIGEDITVSQPALRSLSNPTKYGQPDNFKNYKNLPNTDAGDRGGVHTNSGIPNKAAYNTITKIGVNKAEQIYYRALTVYLTPSSTFKDAKAALIQSAHDLYGSQDAASVEAAWNAVGL

SEQ ID NO: 71717 - protein, 300 aa, Bacillus amyloliquefaciens
AATTGTGTTLKGKTVSLNISSESGKYVLRDLSKPTGTQIITYDLQNREYNLPGTLVSSTTNQFTTSSQRAAVDAHYNLGKVYDYFYQKFNRNSYDNKGGKIVSSVHYGSRYNNAAWIGDQMIYGDGDGSFFSPLSGSMDVTAHEMTHGVTQETANLNYENQPGALNESFSDVFGYFNDTEDWDIGEDITVSQPALRSLSNPTKYGQPDNFVNYKNLPNTDAGDRGGVHTNSGIPNKAAYNTITKIGVNKAEQIYYRALTVYLTPSSTFKDAKAALIQSARDLYGSQDAASVEAAWNAVGL

SEQ ID NO: 71718 - protein, 300 aa, Bacillus amyloliquefaciens
AATTGTGTTLKGKTVSLNISSESGKYVLRDLSKPTGTQIITYDLQNRENNLPGTLVSSTTNQFTTSSQRAAVDAHYNLGKVYDYFYQKFNRNSYDNKGGKIVSSVHYGSRYNNAAWIGDQMIYGDGDGSFFSPLSGSMDVTAHEMTHGVTQETANLNYENQPGALNESFSDVFGYFNDTEDWDIGEDITVSQPALRSLSNPTKYGQPDNFKNYKNLPNTDAGDRGGVHTNSGIPNKAAYNTITKIGVNKAEQIYYRALTVYLTPSSTFKDAKAALIQSARDLYGSQDAASVEAAWNAVGL

SEQ ID NO: 71719 - protein, 300 aa, Bacillus amyloliquefaciens
AATTGTGTTLKGKTVSLNISSESGKYVLRDLSKPTGTQIITYDLQNREYNLPGTLVSSTTNQFTTSSQRAAVDAHYNLGKVYDYFYQKFNRNSYDNKGGKIVSSVHYGSRYNNAAWIGDQMIYGDGDGSFFSPLSGSMDVTAHEMTHGVTQETANLNYENQPGALNESFSDVFGYFNDTEDWDIGEDITVSQPALRSLSNPTKYGQPDNFKNYKNLPNTDAGDYGGVHTNSGIPNKAAYNTITKIGVNKAEQIYYRALTVYLTPSSTFKDAKAALIQSARDFYGSPDAASVEAAWNAVGL

SEQ ID NO: 71720 - protein, 300 aa, Bacillus amyloliquefaciens
AATLGTGTTLKGKTVSLNISSEYGKYVLRDLSKPTGTQIITYDLQNREYNLPGTLVSSTTNQFTTSSQRAAVDAHYNLGKVYDYFYQKFNRNSYDNKGGKIVSSVHYGSRYNNAAWIGDQMIYGDGDGSFFSPLSGSMDVTAHEMTHGVTQETANLNYENQPGALNESFSDVFGYFNDTEDWDIGEDITVSQPALRSLSNPTKYGQPDNFKNYKNLPNTDAGDYGGVHTNSGIPNKAAYNTITKIGVNKAEQIYYRALTVYLTPSSTFKDAKAALIQSARDLYGSQDAASVEAAWNAVGL

SEQ ID NO: 71721 - protein, 300 aa, Bacillus amyloliquefaciens
AATTGTGTTLKGKTVSLNISSESGKYVLRDLSKPTGTQIITYDLQNREYNLPGTLVSSTTNQFTTSSQRAAVDAHYNLGKVYDYFYQKFNRNSYDNKGGKIVSSVHYGSRYNNAAWIGDQMIYGDGDGSFFSPLSGSMDVTAHEMTHGVTQETANLNYENQPGALNESFSDVFGYFNDTEDWDIGEDITFSQPALRSLSNPTKYGQPDNFKNYKNLPNTEAGDYGGVHTNSGIPNKAAYNTITKIGVNKAEQIYYRALTVYLTPQSIFKDAKAALIQSARDLYGSQDAASVEAAWNAVGL

SEQ ID NO: 71722 - protein, 300 aa, Bacillus amyloliquefaciens
AATTGTGTTLKGKTVSLNISSERGKYVLRDLSKPTGTQIITYDLQKREYNLPGTLVSSTTNQFTTSSQRAAVDAHYNLGKVYDYFYQKFNRNSYDNKGGKIVSSVHYGSRYNNAAWIGDQMIYGDGDGSFFSPLSGSMDVTAHEMTHGVTQETANLNYENQPGALNESFSDVFGYFNDTEDWDIGEDITVSQPALRSLSNPTKYGQPDNFKNYKNLPNTDAGDYGGVHTNSGIPNKAAYNTITKIGVNKAEQIYYRALTVYLTPSSTFKDAKAALIQSARDLYGSQDAASVEAAWNAVGL

SEQ ID NO: 71723 - protein, 300 aa, Bacillus amyloliquefaciens
AATTGTGTTLKGKTVSLNISSESGKYVLRDLSKPTGTQIITYDLQNREYNLPGTLVSSTTNQFTTSSQRAAVDAHYNLGKVYDYFYQKFNRNSYDNKGGKIVSSVHYGSRYNNAAWIGDQMIYGDGDGSFFSPLSGSMDVTAHEMTHGVTQETANLNYENQPGALNESFSDVFGYFNDTEDWDIGEDITVSQPALRSLSNPTKYGQPDNFKNYKNLPNTDAGDRGGVHTNSGIPNKAAYNTITKIGVNKAEQIYYRALTVYLTPSSTFKDAKAALIQSAKDLYGSQDAASVEAAWNAVGL

SEQ ID NO: 71724 - protein, 300 aa, Bacillus amyloliquefaciens
AATVGTGTTLKGKTVSLNISSEWGKYVLRDLSKPTGTQIITYDLQNREYNLPGTLVSSTTNQFTTSSQRAAVDAHYNLGKVYDYFYQKFNRNSYDNKGGKIVSSVHYGSRYNNAAWIGDQMIYGDGDGSFFSPLSGSMDVTAHEMTHGVTQETANLNYENQPGALNESFSDVFGYFNDTEDWDIGEDITVSQPALRSLSNPTKYGQPDNFKNYKNLPNTDAGDYGGVHTNSGIPNKAAYNTITKIGVNKAEQIYYRALTVYLTPSSTFKDAKAALIQSARDLYGSQDAASVEAAWNAVGL

SEQ ID NO: 71725 - protein, 300 aa, Bacillus amyloliquefaciens
AATTGTGTTLKGKTVSLNISSETGKYVLRDLSKPTGTQIITYDLQNREYNLPGTLVSSTTNQFTTSSQRAAVDAHYNLGKVYDYFYQKFNRNSYDNKGGKIVSSVHYGSRYNNAAWIGDQMIYGDGDGSFFSPLSGSMDVTAHEMTHGVTQETANLNYENQPGALNESFSDVFGYFNDTEDWDIGEDITVSQPALRSLSNPTKYGQPDNFKNYKNLPNTDAGDRGGVHTNSGIPNKAAYNTITKIGVNKAEQIYYRALTVYLTPSSTFKDAKAALIQSARDLYGSQDAASVEAAWNAVGL

SEQ ID NO: 71726 - protein, 300 aa, Bacillus amyloliquefaciens
AATTGTGTTLKGKTVSLNISSESGKYVLRDLSKPTGTQIITYDLQNREYNLPGTLVSSKTNQFTTQSQRAAVDAHYNLGKVYDYFYQKFNRNSYDNKGGKIVSSVHYGSRYNNAAWIGDQMIYGDGDGVFFSPLSGSMDVTAHEMTHGVTQETANLNYENQPGALNESFSDVFGYFNDTEDWDIGEDITVSQPALRSLSNPTKYGQPDNFKNYKNLPNTDAGDYGGVHTNSGIPNKAAYNTITKIGVNKAEQIYYRALTVYLTPSSTFKDAKAALIQSARDLYGSQDAASVEAAWNAVGL

SEQ ID NO: 71727 - protein, 300 aa, Bacillus amyloliquefaciens
AATTGTGTTLKGYTVSLNISSESGKYVLRDLSKPTGTQIITYDLQNREYNLPGTLVSSTTNQFTTSSQRAAVDAHYNLGKVYDYFYQKFNRNSYDNKGGKIVSSVHYGSRYNNAAWIGDQMIYGDGDGSFFSPLSGSMDVTAHEMTHGVTQETANLNYENQPGALNESFSDVFGYFNDTEDWDIGEDITVSQPALRSLSNPTKYGQPDNFKNYKNLPNTDAGDRGGVHTNSGIPNKAAYNTITKIGVNKAEQIYYRALTVYLTPSSTFKDAKAALIQSARDLYGSQDAASVEAAWNAVGL

SEQ ID NO: 71728 - protein, 300 aa, Bacillus amyloliquefaciens
AATTGTGTTLKGKTVSLNISSESGKYVLRDLSKPTGTQIITYDLQNREYNLPGTLVSSTTNQFTTSSQRAAVDAHYNLGKVYDYFYQKFDRNSYDNKGGKIVSSVHYGSRYNNAAWIGDQMIYGDGDGSFFSPLSGSMDVTAHEMTHGVTQETANLNYENQPGALNESFSDVFGYFNDTEDWDIGEDITVSQPALRSLSNPTKYGQPDNFKNYKNLPNTDAGDRGGVHTNSGIPNKAAYNTITKIGVNKAEQIYYRALTVYLTPSSTFKDAKAALIQSARDLYGSQDAASVEAAWNAVGL

SEQ ID NO: 71729 - protein, 300 aa, Bacillus amyloliquefaciens
AATTGTGTTLKGKTVSLNISSESGKYVLRDLSKPTGTQIITYDLQNREYNLPGTLVSSTTNQFTTSSQRAAVDAHYNLGKVYDYFYQKFNRNSYDNKGGKIVSSVHYGSRYNNAAWIGDQMIYGDGDGSFFSPLSGSMDVTAHEMTHGVTQETANLNYENQPGALNESFSDVFGYFNDTEDWDIGEDITVSQPALRSLSNPTKYGQPDNFKNYKNLPNTDAGDRGGVHTNSGIPNKAAYNTITKIGVNKAEQIYYRALTVYLEPSSTFKDAKAALIQSARDLYGSQDAASVEAAWNAVGL

SEQ ID NO: 71730 - protein, 300 aa, Bacillus amyloliquefaciens
AATTGTGTTLKGKTVSLNISSESGKYVLRDLSKPTGTQIITYDLQNREYNLPGTLVSSTTNQFTTSSQRAAVDAHYNLGKVYDYFYQKFNRNSYDNKGGKIVSSVHYGSRYNNAAWIGDQMIYGDGDGSFFSPLSGSMDVTAHEMTHGVTQETANLNYENQPGALNESFSDVFGYFNDTEDWDIGEDITVSQPALRSLSNPTKYGQPDNFKNYKNLPNTDAGDRGGVHTNSGIPNKAAYNTITKIGVNKAEQIYYRALTVILTPSSTFKDAKAALIQSARDLYGSQDAASVEAAWNAVGL

SEQ ID NO: 71731 - protein, 300 aa, Bacillus amyloliquefaciens
AATTGTGTTLKGKTVSLNISSESGKYVLRDLSKPTGTQIITYDLQNREYNLPGTLVSSTTNQFTTSSQRAAVDAHYNLGKVYDYFYQKFNRNSYDNKGGKIVSSVHYGSCYNNAAWIGDQMIYGDGDGSFFSPLSGSMDVTAHEMTHGVTQETANLNYENQPGALNESFSDVFGYFNDTEDWDIGEDITVSQPALRSLSNPTKYGQPDNFKNYKNLPNTDAGDRGGVHTNSGIPNKAAYNTITKIGVNKAEQIYYRALTVYLTPSSTFKDAKAALIQSARDLYGSQDAASVEAAWNAVGL

SEQ ID NO: 71732 - protein, 300 aa, Bacillus amyloliquefaciens
AATTGTGTTLKGKTVSLNISSESGKYVLRDLSKPTGTQIITYDLQNREYNLPGTLVSSTTNQFTTSSQRAAVDAHYNLGKVYDYFYQKFNRNSYDNKGGKIVSSVHYGSRYNNAAWIGDQMIYGDGDGSFFSPLSGSMDVTAHEMTHGVTQETANLNYENQPGALNESFSDVFGYFNDTEDWDIGEDITVSQPALRSLSNPTKYGQPDNFKNYKNLPNTDAGDRGGVHTNSGIPNKAAYNTITKIGVNKAEQIYYRALTVYLTPSSTFKDAKHALIQSARDLYGSQDAASVEAAWNAVGL

SEQ ID NO: 71733 - protein, 300 aa, Bacillus amyloliquefaciens
AATVGTGTTLKGKTVSLNISSESMKYVLRDLSKPTGTQIITYDLQNREYNLPGTLVSSTTNQFTTSSQRAAVDAHYNLGKVYDYFYQKFNRNSYDNKGGKIVSSVHYGSRYNNAAWIGDQMIYGDGDGSFFSPLSGSMDVTAHEMTHGVTQETANLNYENQPGALNESFSDVFGYFNDTEDWDIGEDITVSQPALRSLSNPTKYGQPDNFKNYKNLPNTDAGDYGGVHTNSGIPNKAAYNTITKIGVNKAEQIYYRALTVYLTPSSTFKDAKAALIQSARDLYGSQDAASVEAAWNAVGL

SEQ ID NO: 71734 - protein, 300 aa, Bacillus amyloliquefaciens
AATTGTGTTLKGKTVSLNISSESGKYVLRDLSKPTGTQIITYDLQNREYNLPGTLVSSRTNQFTTSSQRAAVDAHYNLGKVYDYFYQKFNRNSYDNKGGKIVSSVHYGSRYNNAAWIGDQMIYGDGDGQFFSPLSGSMDVTAHEMTHGVTQETANLNYENQPGALNESFSDVFGYFNDTEDWDIGEDITVRQPALRSLSNPTKYGQPDNFKNYKNLPNTDAGDYGGVHTNSGIPNKAAYNTITKIGVNKAEQIYYRALTVYLTPSSTFKDAKAALIQSARDLYGSQDAASVEAAWNAVGL

SEQ ID NO: 71735 - protein, 300 aa, Bacillus amyloliquefaciens
AATTGTGTTLKGKTVSLNISSESGKYVLRDLSKPTGTQIITYDLQNREYNLPGTLVSSTTNQFTTSSQRAAVDAHYNLGKVYDYFYQKFNRNSYDNKGGKIVSSVHYGSRYNNAAWIGDQMIYGDGDGSFFSPLSGSMDVTAHEMTHGVTQETANLNYENQPGALNESFSDVFGYFNDTEDWDIGEDITLSQPALRSLSNPTKYGQPDNFKNYKNLPNTEAGDYGGVHTNSGIPNKAAYNTITKIGVNKAEQIYYRALTVYLTPNSTFKDAKAALIQSARDLYGSQDAASIEAAWNAVGL

SEQ ID NO: 71736 - protein, 300 aa, Bacillus amyloliquefaciens
AATSGTGTTLKGKTVSLNISSESGKYVLRDLSKPTGTQIITYDLQNREYNLPGTLVSSTTNQFTTSSQRAAVDAHYNLGKVYDYFYQKFNRNSYDNKGGKIVSSVHYGSRYNNAAWIGDQMIYGDGDGSFFSPLSGSMDVTAHEMTHGVTQETANLNYENQPGALNESFSDVFGYFNDTEDWDIGEDITVSQPALRSLSNPTKYGQPDNFKNYKNLPNTDAGDYGGVHTNSGIPNKAAYNTITKIGVNKAEQIYYRALTVYLTPSSTFKDAKAALIQSARDMYGSQDAASVEAAWNAVGL

SEQ ID NO: 71737 - protein, 300 aa, Bacillus amyloliquefaciens
AATTGTGTTLKGKTVSLNISSESGKYVLRDLSKPTGTQIITYDLQNREYNLPGTLVSSTTNQFTTSSQRAAVDAHYNLGKVYDYFYQKFNRNSYDNKGGKIVSSVHYGSRYNNAAWIGDQMIYGDGDGSFFSPLSGSMDVTAHEMTHGVTQETAQLNYENQPGALNESFSDVFGYFNDTEDWDIGEDITVSQPALRSLSNPTKYGQPDNFKNYKNLPNTDAGDRGGVHTNSGIPNKAAYNTITKIGVNKAEQIYYRALTVYLTPSSTFKDAKAALIQSARDLYGSQDAASVEAAWNAVGL

SEQ ID NO: 71738 - protein, 300 aa, Bacillus amyloliquefaciens
AATTGTGTTLKGKTVSLNISSESGKYVLRDLSKPTGTQIITYDLQNREYNLPGTLVSSTTNQFTTSSQRAAVDAHYNLGKVYDYFYQKFNRNSYDNKGGKIVSSVHYGSRYNNAAWIGDQMIYGDGDGSFFSPLSGAMDVTAHEMTHGVTQETANLNYENQPGALNESFSDVFGYFNDTEDWDIGEDITVSQPALRSLSNPTKYGQPDNFKNYKNLPNTDAGDRGGVHTNSGIPNKAAYNTITKIGVNKAEQIYYRALTVYLTPSSTFKDAKAALIQSARDLYGSQDAASVEAAWNAVGL

SEQ ID NO: 71739 - protein, 300 aa, Bacillus amyloliquefaciens
AATTGTGTTLKGKTVSLNISSESSKYVLRDLSKPTGTQIITYDLQNREYNLPGTLVSSTTNQFTTSSQRAAVDAHYNLGKVYDYFYQKFNRNSYDNKGGKIVSSVHYGSRYNNAAWIGDQMIYGDGDGSFFSPLSGSMDVTAHEMTHGVTQETANLNYENQPGALNESFSDVFGYFNDTEDWDIGEDITVSQPALRSLSNPTKYGQPDNFKNYKNLPNTDAGDRGGVHTNSGIPNKAAYNTITKIGVNKAEQIYYRALTVYLTPSSTFKDAKAALIQSARDLYGSQDAASVEAAWNAVGL

SEQ ID NO: 71740 - protein, 300 aa, Bacillus amyloliquefaciens
AATTGTGTTLKGKTVSLNISSESGKYVLRDLSKPTGTQIITYDLQNREYNLPGTLVSSTTNQFTTSSQRAAVDAHYNLGKVYDYFYQKFNRNSYDNKGGKIVSSVHYGSRYNNAAWIGDQMIYGDGDGSFFSPLSGSMDVTAHEMTHGVTQETANLNYENQPGALNESFSDVFGYFNDTEDWDIGEDITVSQPALRSLSNPTKYGQPDNFKNYSNLPNTDAGDRGGVHTNSGIPNKAAYNTITKIGVNKAEQIYYRALTVYLTPSSTFKDAKAALIQSARDLYGSQDAASVEAAWNAVGL

SEQ ID NO: 71741 - protein, 300 aa, Bacillus amyloliquefaciens
AATTGTGTTLKGKTVSLNISSESGKYVLRDLSKPTGTQIITYDLQNREYNLPGTLVSSTTNQFTTSSQRAAVDAHYNLGKVYDYFYQKFNRNSYDNKGGKIVSSVHYGSRYNNAAWIGDQMIYGDGDGSFFSPLSGSMDVTAHEMTHGVTQETANLNYENQPGALNESFSDVFGYFNDTEDWDIGEDITVSQPALRSLSNPTKYGQPDNFKNYKNLPNTDAGDRGGVHTNSGIPNKAAYNTITKIGVNKAEQIYYRALTDYLTPSSTFKDAKAALIQSARDLYGSQDAASVEAAWNAVGL

SEQ ID NO: 71742 - protein, 300 aa, Bacillus amyloliquefaciens
AATTGTGTTLKGITVSLNISSESGKYVLRDLSKPTGTQIITYDLQNREYNLPGTLVSSTTNQFTTSSQRAAVDAHYNLGKVYDYFYQKFNRNSYDNKGGKIVSSVHYGSRYNNAAWIGDQMIYGDGDGSFFSPLSGSMDVTAHEMTHGVTQETANLNYENQPGALNESFSDVFGYFNDTEDWDIGEDITVSQPALRSLSNPTKYGQPDNFKNYKNLPNTDAGDRGGVHTNSGIPNKAAYNTITKIGVNKAEQIYYRALTVYLTPSSTFKDAKAALIQSARDLYGSQDAASVEAAWNAVGL

SEQ ID NO: 71743 - protein, 300 aa, Bacillus amyloliquefaciens
AATTGTGTTLKGKTVSLNISSESGKYVLRDLSKPTGTQIITYDLQNREYYLPGTLVSSRTNQFTTSSQRAAVDAHYNLGKVYDYFYQKFNRNSYDNKGGKIVSSVHYGSRYNNAAWIGDQMIYGDGDGQFFSPLSGSMDVTAHEMTHGVTQETANLNYENQPGALNESFSDVFGYFNDTEDWDIGEDITVSQPALRSLSNPTKYGQPDNFKNYKNLPNTDAGDYGGVHTNSGIPNKAAYNTITKIGVNKAEQIYYRALTVYLTPSSTFKDAKAALIQSARDLYGSQDAASVEAAWNAVGL

SEQ ID NO: 71744 - protein, 300 aa, Bacillus amyloliquefaciens
AATTGTGTTLKGKTVSLNISSESGKYVLRDLSKPTGTQIITYDLQNREYNLPGTLVSSTTNQFTTSSQRAAVDAHYNLGKVYDYFYQKFNRNSYDNKGGKIVSSVHYGSRYNNAAWIGDQMIYGDGDGSFFSPLSGSMDVTAHEMTHGVTQETANLNYENQPGALNESFSDVFGYFNDTEDWDIGEDITVSQPALRSLSNPTKYGQPDNFKNYKNLPNTDAGDRGGVHTNSGIPNKAAYNTITKIGVNKAEQIYYRALTVYLTPDSTFKDAKAALIQSARDLYGSQDAASVEAAWNAVGL

SEQ ID NO: 71745 - protein, 300 aa, Bacillus amyloliquefaciens
AATTGTGTTLKGKTVSLNISSESGKYVLRDLSKPTGTQIITYDLQNREYNLPGTLVSSTTNQFTTSSQRAAVDAHYNLGKVYDYFYQKFNRNSYDNKGGKIVSSVHYGSRYNNAAWIGDQMIYGDGDGSFFSPLSGSMDVTAHEMTHGVTQETANLNYENQPGALNESFSDVFGYFNDTEDWDIGEDITVSQPALRSLSNPTKYGQPDNFKNYKNLPNTDAGDRGGVHTNSGIPNKAAYNTITKIGVNKAEQIYYRALTVYLTPSSTFKDAKAALIQSARDLYGSADAASVEAAWNAVGL

SEQ ID NO: 71746 - protein, 300 aa, Bacillus amyloliquefaciens
AATTGTGTTLKGKTVSLNISSESGKYVLRDLSKPTGTQIITYDLQNREYNLPGTLVSSTTNQFTTSSQRAAVDAHYNLGKVYDYFYQKFNRNSYDNKGGKIVSSVHYGSRYNNAAWIGDQMIYGDGDGSFFSPLSGSMDVTAHEMTHGVTQETANLNYENQPGALNESFSDVFGYFNDTEDWDIGEDITVSQPALRSLSNPTKYGQPDNFKNYKNLPNTDAGDRGGVHTNSGIPNKAAYNTITKIGVNKAEQIYYRALTVYLTPPSTFKDAKAALIQSARDLYGSQDAASVEAAWNAVGL

SEQ ID NO: 71747 - protein, 300 aa, Bacillus amyloliquefaciens
AATTGTGTTLKGKTVSLNISSESGKYVLRDLSKPTGTQIITYDLQNREYNLPGTLVSSTTNQFTTSSQRAAVDAHYNLGKVYDYFYQKFNRNSYDNKGGQIVSSVHYGSRYNNAAWIGDQMIYGDGDGSFFSPLSGSMDVTAHEMTHGVTQETANLNYENQPGALNESFSDVFGYFNDTEDWDIGEDITVSQPALRSLSNPTKYGQPDNFKNYKNLPNTDAGDRGGVHTNSGIPNKAAYNTITKIGVNKAEQIYYRALTVYLTPSSTFKDAKAALIQSARDLYGSQDAASVEAAWNAVGL

SEQ ID NO: 71748 - protein, 300 aa, Bacillus amyloliquefaciens
AATTGTGTTLKGKTVSLNISSESGKYVLRDLSKPTGTQIITYDLQNRETNLPGTLVSSTTNQFTTSSQRAAVDAHYNLGKVYDYFYQKFNRNSYDNKGGKIVSSVHYGSRYNNAAWIGDQMIYGDGDGSFFSPLSGSMDVTAHEMTHGVTQETANLNYENQPGALNESFSDVFGYFNDTEDWDIGEDITVSQPALRSLSNPTKYGQPDNFKNYKNLPNTDAGDRGGVHTNSGIPNKAAYNTITKIGVNKAEQIYYRALTVYLTPSSTFKDAKAALIQSARDLYGSQDAASVEAAWNAVGL

SEQ ID NO: 71749 - protein, 300 aa, Bacillus amyloliquefaciens
AATTGTGTTLKGKTVSLNISSESGKYVLRDLSKPTGTQIITYDLQNREYNLPGTLVSSTTNQFTTSSQRAAVDAHYNLGKVYDYFYQKFNRNSYDNKGGKIVSSVHYGSRYNNAAWIGDQMIYGDGDGSFFSPLSGSMDVTAHEMTHGVTQETANLNYENQPGALNESFSDVFGYFNDTEDWDIGEDITVSQPALRSLSNPTKYGQPDNFKNYKNLPNTDAGDRGGVHTNSGIPNKAAYNTITKIGVNKAEQIYYRALTPYLTPSSTFKDAKAALIQSARDLYGSQDAASVEAAWNAVGL

SEQ ID NO: 71750 - protein, 300 aa, Bacillus amyloliquefaciens
AATTGTGTTLKGKTVSLNISSESGKYVLRDLSKPTGTQIITYDLQNREYNLPGTLVSSTTNQFTTSSQRAAVDAHYNLGKVYDYFYQKFNRNSYDNKGGKIVSSVHYGSRYNNAAWIGDQMIYGDGDGSFFSPLSGSMDVTAHEMTHGVTQETANLNYENQPGALNESFSDVFGYFNDTEDWDIGEDITVSQPALRSLSNPTKYGQPDNFKNYKNLPNTDAGDRGGVHTNSGIPNKAAYNTITMIGVNKAEQIYYRALTVYLTPSSTFKDAKAALIQSARDLYGSQDAASVEAAWNAVGL

SEQ ID NO: 71751 - protein, 300 aa, Bacillus amyloliquefaciens
AATTGTGTTLKGKTVSLNISSESGKYVLRDLSKPTGTQIITYDLQNREYNLPGTLVSSTTNQFTTSSQRAAVDAHYNLGKVYDYFYQKFNRNSYDNKGGKIVSSVHYGSRYNNAAWIGDQMIYGDGDGSFFSPLSGSMDVTAHEMTHGVTQETANLNYENQPGALNESFSDVFGYFNDTEDWDIGLDITVSQPALRSLSNPTKYGQPDNFKNYKNLPNTDAGDRGGVHTNSGIPNKAAYNTITKIGVNKAEQIYYRALTVYLTPSSTFKDAKAALIQSARDLYGSQDAASVEAAWNAVGL

SEQ ID NO: 71752 - protein, 300 aa, Bacillus amyloliquefaciens
AATTGTGTTLKGKTVSLNISSESGKYVLRDLSKPTGTQIITYDLQNREYNLPGTLVSSTTNQFTTSSQRAAVDAHYNLGKVYDYFYQKFNRNSYDNKGGKIVSSVHYGSRYNNAAWIGDQMIYGDGDGSFFSPLSGSMDVTAHEMTHGVTQETANLNYENQPGALNESFSDVFGYFNDTEDWDIGEDITVSQPALRSLSNPTKYGQPDNFKNYKNLPNTDAGDRGGVHTNSGIPNKAAYNTITKIGVNKAEQIYYRALTVYLTPSSTFKDAKAALIQSARDLYGCQDAASVEAAWNAVGL

SEQ ID NO: 71753 - protein, 300 aa, Bacillus amyloliquefaciens
AATTGTGTTLKGGTVSLNISSESGKYVLRDLSKPTGTQIITYDLQNREYNLPGTLVSSTTNQFTTSSQRAAVDAHYNLGKVYDYFYQKFNRNSYDNKGGKIVSSVHYGSRYNNAAWIGDQMIYGDGDGSFFSPLSGSMDVTAHEMTHGVTQETANLNYENQPGALNESFSDVFGYFNDTEDWDIGEDITVSQPALRSLSNPTKYGQPDNFKNYKNLPNTDAGDRGGVHTNSGIPNKAAYNTITKIGVNKAEQIYYRALTVYLTPSSTFKDAKAALIQSARDLYGSQDAASVEAAWNAVGL

SEQ ID NO: 71754 - protein, 300 aa, Bacillus amyloliquefaciens
AATTGTGTTLKGKTVSLNISSESGKYVLRDLSKPTGTQIITYDLQNREYNLPGTLVSSTTNQFTTSSQRAAVDAHYNLGKVYDYFYQKFNRNSYDNKGGKIVSSVHYGSRYNNAAWIGDQMIYGDGDGSFFSPLSGSMYVTAHEMTHGVTQETANLNYENQPGALNESFSDVFGYFNDTEDWDIGEDITVSQPALRSLSNPTKYGQPDNFKNYKNLPNTDAGDRGGVHTNSGIPNKAAYNTITKIGVNKAEQIYYRALTVYLTPSSTFKDAKAALIQSARDLYGSQDAASVEAAWNAVGL

SEQ ID NO: 71755 - protein, 300 aa, Bacillus amyloliquefaciens
AATTGTGTTLKGKTVSLNISSESGKYVLRDLSKPTGTQIITYDLQNREYNLPGTLVSSTTNQFTTSSQRAAVDAHYNLGKVYDYFYQKFNRNSYDNKGGKIVSSVHYGSRYNNAAWIGDQMIYGDGDGSFFSPLSGSMDVTAHEMTHGVTQETANLNYENQPGALNESFSDVFGYFNDTEDWDIGEDITVSQPALRSLSNPTKYGQPDNFKNYKNLPNTDAGDRGGVHTNSGIPNKAAYNTITKIGVNKAEQIYYRALTVYLTPSSTFKDAKAALIQSARDLYGEQDAASVEAAWNAVGL

SEQ ID NO: 71756 - protein, 300 aa, Bacillus amyloliquefaciens
AATTGTGTTLKGNTVSLNISSESGKYVLRDLSKPTGTQIITYDLQNREYNLPGTLVSSTTNQFTTSSQRAAVDAHYNLGKVYDYFYQKFNRNSYDNKGGKIVSSVHYGSRYNNAAWIGDQMIYGDGDGSFFSPLSGSMDVTAHEMTHGVTQETANLNYENQPGALNESFSDVFGYFNDTEDWDIGEDITVSQPALRSLSNPTKYGQPDNFKNYKNLPNTDAGDRGGVHTNSGIPNKAAYNTITKIGVNKAEQIYYRALTVYLTPSSTFKDAKAALIQSARDLYGSQDAASVEAAWNAVGL

SEQ ID NO: 71757 - protein, 300 aa, Bacillus amyloliquefaciens
AATTGTGTTLKGKTVSLNISSESGKYVLRDLSKPTGTQIITYDLQQKEYNLPGTLVSSTTNQFTTSSQRAAVDAHYNLGKVYDYFYQKFNRNSYDNKGGKIVSSVHYGSRYNNAAWIGDQMIYGDGDGSFFSPLSGSMDVTAHEMTHGVTQETANLNYENQPGALNESFSDVFGYFNDTEDWDIGEDITVSQPALRSLSNPTKYGQPDNFKNYKNLPNTDAGDYGGVHTNSGIPNKAAYNTITKIGVNKAEQIYYRALTVYLTPSSTFKDAKAALIQSARDLYGSQDAASVEAAWNAVGL

SEQ ID NO: 71758 - protein, 300 aa, Bacillus amyloliquefaciens
AATTGTGTTLKGKTVSLNISSESGKYVLRDLSKPTGTQIITYDLQNQEYNLPGTLVSSTTNQFTTSSQRAAVDAHYNLGKVYDYFYQKFNRNSYDNKGGKIVSSVHYGSRYNNAAWIGDQMIYGDGDGSFFSPLSGSMDVTAHEMTHGVTQETANLNYENQPGALNESFSDVFGYFNDTEDWDIGEDITVSQPALRSLSNPTKYGQPDNFKNYKNLPNTDAGDRGGVHTNSGIPNKAAYNTITKIGVNKAEQIYYRALTVYLTPSSTFKDAKAALIQSARDLYGSQDAASVEAAWNAVGL

SEQ ID NO: 71759 - protein, 300 aa, Bacillus amyloliquefaciens
AATTGTGTTLKGKTVSLNISSESGKYVLRDLSKPTGTQIITYDLQNREYNLPGTLVSSTTNQFTTSSQRAAVDAHYNLGKVYDYFYQKFNRNSYDNKGGKIVSSVHYGSRYNNAAWIGDQMIYGDGDGSFFSPLSGSMDVTAHEMTHGVTQETANLNYENQPGALNESFSDVFGYFNDTEDWDIGEDITVSQPALRSLSNPTKYGQPDNFKNYKNLPNTDAGDRGGVHTNSGIPNKAAYNTITKIGVNKAEQIYYRALTTYLTPSSTFKDAKAALIQSARDLYGSQDAASVEAAWNAVGL

SEQ ID NO: 71760 - protein, 300 aa, Bacillus amyloliquefaciens
AATSGTGTTLKGKTVSLNISSESNKYVLRDLSKPTGTQIITYDLQNREYNLPGTLVSSTTNQFTTSSQRAAVDAHYNLGKVYDYFYQKFNRNSYDNKGGKIVSSVHYGSRYNNAAWIGDQMIYGDGDGSFFSPLSGSMDVTAHEMTHGVTQETANLNYENQPGALNESFSDVFGYFNDTEDWDIGEDITVSQPALRSLSNPTKYGQPDNFKNYKNLPNTDAGDYGGVHTNSGIPNKAAYNTITKIGVNKAEQIYYRALTVYLTPSSTFKDAKAALIQSARDLYGSQDAASVEAAWNAVGL

SEQ ID NO: 71761 - protein, 300 aa, Bacillus amyloliquefaciens
AATTGTGTTLKGKTVSLNISSESGKYVLRDLSKPTGTQIITYDLQNREYNLPGTLVSSTTNHFTTQSQRAAVDAHYNLGKVYDYFYQKFNRNSYDNKGGKIVSSVHYGSRYNNAAWIGDQMIYGDGDGQFFSPLSGSMDVTAHEMTHGVTQETANLNYENQPGALNESFSDVFGYFNDTEDWDIGEDITVSQPALRSLSNPTKYGQPDNFKNYKNLPNTDAGDYGGVHTNSGIPNKAAYNTITKIGVNKAEQIYYRALTVYLTPSSTFKDAKAALIQSARDLYGSQDAASVEAAWNAVGL

SEQ ID NO: 71762 - protein, 300 aa, Bacillus amyloliquefaciens
AATTGTGTTLKGKTVSLNISSEGGKYVLRDLSKPTGTQIITYDLQNREYNLPGTLVSSTTNQFTTSSQRAAVDAHYNLGKVYDYFYQKFNRNSYDNKGGKIVSSVHYGSRYNNAAWIGDQMIYGDGDGSFFSPLSGSMDVTAHEMTHGVTQETANLNYENQPGALNESFSDVFGYFNDTEDWDIGEDITVSQPALRSLSNPTKYGQPDNFKNYKNLPNTDAGDRGGVHTNSGIPNKAAYNTITKIGVNKAEQIYYRALTVYLTPSSTFKDAKAALIQSARDLYGSQDAASVEAAWNAVGL

SEQ ID NO: 71763 - protein, 300 aa, Bacillus amyloliquefaciens
AATTGTGTTLKGKTVSLNISSESGKYVLRDLSKPTGTQIITYDLQNREYNLPGTLVSSTTNQFTTSSQRAAVDAHYNLGKVYDYFYQKFNRNSYDNKGGKIVSSVHYGSRYNNAAWIGDQMIYGDGDGSFFSPLSGSMDVTAHEMTHGVTQETANLNYENQPGALNESFSDVFGYFNDTEDWDIGEDITVSQPALRSLSNPTKYGQPDNFKNYQNLPNTDAGDRGGVHTNSGIPNKAAYNTITKIGVNKAEQIYYRALTVYLTPSSTFKDAKAALIQSARDLYGSQDAASVEAAWNAVGL

SEQ ID NO: 71764 - protein, 300 aa, Bacillus amyloliquefaciens
AATTGTGTTLKGKTVSLNISSESGKYVLRDLSKPTGTQIITYDLQNREYNLPGTLVSSTTNQFTTSSQRAAVDAHYNLGKVYDYFYQKFNRNSYDNKGGKIVSSVHYGSRYNNAAWIGDQMIYGDGDGSFFSPLSGSMCVTAHEMTHGVTQETANLNYENQPGALNESFSDVFGYFNDTEDWDIGEDITVSQPALRSLSNPTKYGQPDNFKNYKNLPNTDAGDRGGVHTNSGIPNKAAYNTITKIGVNKAEQIYYRALTVYLTPSSTFKDAKAALIQSARDLYGSQDAASVEAAWNAVGL

SEQ ID NO: 71765 - protein, 300 aa, Bacillus amyloliquefaciens
AATTGTGTTLKGKTVSLNISSESGKYVLRDLSKPTGTQIITYDLQNREYNLPGTLVSSTTNQFTTSSQRAAVDAHYNLGKVYDYFYQKFNRNSYDNKGGKIVSSVHYGSRYNNAAWIGDQMIYGDGDGSFFSPLSGSMDVTAHEMTHGVTQETANLNYENQPGALNESFSDVFGYFNDTEDWDIGEDITVSQPALRSLSNPTKYGQPDNFKNYKNLPNTDAGDYGGVHTNSGIPNKAAYNTITKIGVNKAEQIYYRALTVYLWPSSTFKDAKHALIQSARDLYGWQDAASVEAAWNAVGL

SEQ ID NO: 71766 - protein, 300 aa, Bacillus amyloliquefaciens
AATLGTGTTLKGKTVSLNISSEYMKYVLRDLSKPTGTQIITYDLQNREYNLPGTLVSSTTNQFTTSSQRAAVDAHYNLGKVYDYFYQKFNRNSYDNKGGKIVSSVHYGSRYNNAAWIGDQMIYGDGDGSFFSPLSGSMDVTAHEMTHGVTQETANLNYENQPGALNESFSDVFGYFNDTEDWDIGEDITVSQPALRSLSNPTKYGQPDNFKNYKNLPNTDAGDYGGVHTNSGIPNKAAYNTITKIGVNKAEQIYYRALTVYLTPSSTFKDAKAALIQSARDLYGSQDAASVEAAWNAVGL

SEQ ID NO: 71767 - protein, 300 aa, Bacillus amyloliquefaciens
AATTGTGTTLKGKTVSLNISSESGKYVLRDLSKPTGTQIITYDLQNREYNLPGTLVSSTTNQFTTSSQRAAVDAHYNLGKVYDYFYQKFNRNSYDNKGGKIVSSVHYGSRYNNAAWIGDQMIYGDGDGSFFSPLSGSMDVTAHEMTHGVTQETANLNYENQPGALNESFSDVFGYFNDTEDWDIGEDITVSQPALRSLSNPTKYGQPDNFKNYKNLPNTDAGDYGGVHTNSGIPNKAAYNTITKIGVNKAEQIYYRALTVYLHPSSTFKDAKHALIQSARDLYGSQDAVSVEAAWNAVGL

SEQ ID NO: 71768 - protein, 300 aa, Bacillus amyloliquefaciens
AATTGTGTTLKGKTVSLNISSESGKYVLRDLSKPTGTQIITYDLQNKEYFLPGKLVSSTTNQFTTSSQRAAVDAHYNLGKVYDYFYQKFNRNSYDNKGGKIVSSVHYGSRYNNAAWIGDQMIYGDGDGSFFSPLSGSMDVTAHEMTHGVTQETANLNYENQPGALNESFSDVFGYFNDTEDWDIGEDITVSQPALRSLSNPTKYGQPDNFKNYKNLPNTDAGDYGGVHTNSGIPNKAAYNTITKIGVNKAEQIYYRALTVYLTPSSTFKDAKAALIQSARDLYGSQDAASVEAAWNAVGL

SEQ ID NO: 71769 - protein, 300 aa, Bacillus amyloliquefaciens
AATTGTGTTLKGKTVSLNISSESGKYVLRDLSKPTGTQIITYDLQNREYNLPGTLVSSTTNQFTTSSQRAAVDAHYNLGKVYDYFYQKFNRNSYDNKGGKIVSSVHYGSRYNNAAWIGDQMIYGDGDGSFFSPLSGSMDVTAHEMTHGVTQETANLNYENQPGALNESFSDVFGYFNDTEDWDIGEDITVSQPALRSLSNPTKYGQPDNFKNYKNLPNTDAGDYGGVHTNSGIPNKAAYNTITKIGVNKAEQIYYRALTVYLTPSSTFKDAKHALIQSARDLYGPQDAASVGAAWNAVGL

SEQ ID NO: 71770 - protein, 300 aa, Bacillus amyloliquefaciens
AATTGTGTTLKGKTVSLNISSESGKYVLRDLSKPTGTQIITYDLQQREYYLPGKLVSSTTNQFTTSSQRAAVDAHYNLGKVYDYFYQKFNRNSYDNKGGKIVSSVHYGSRYNNAAWIGDQMIYGDGDGSFFSPLSGSMDVTAHEMTHGVTQETANLNYENQPGALNESFSDVFGYFNDTEDWDIGEDITVSQPALRSLSNPTKYGQPDNFKNYKNLPNTDAGDYGGVHTNSGIPNKAAYNTITKIGVNKAEQIYYRALTVYLTPSSTFKDAKAALIQSARDLYGSQDAASVEAAWNAVGL

SEQ ID NO: 71771 - protein, 300 aa, Bacillus amyloliquefaciens
AATTGTGTTLKGKTVSLNISSESGKYVLRDLSKPTGTQIITYDLQNREYNLPGTLVSSTTNQFTTSSQRAAVDAHYNLGKVYDYFYQKFNRNSYDNKGGKIVSSVHYGSRYNNAAWIGDQMIYGDGDGSFFSPLSGSMDVTAHEMTHGVTQETANLNYENQPGALNESFSDVFGYFNDTEDWDIGEDITVSQPALRSLSNPTKYGQPDNFKNYKNLPNTDAGDYGGVHTNSGIPNKAAYNTITKIGVNKAEQIYYRALTVYLTPPSTFKDAKAALIQSARDMYGSPDAASVEAAWNAVGL

SEQ ID NO: 71772 - protein, 300 aa, Bacillus amyloliquefaciens
AATTGTGTTLKGKTVSLNISSEKGKYVLRDLSKPTGTQIITYDLQNREYNLPGTLVSSTTNQFTTSSQRAAVDAHYNLGKVYDYFYQKFNRNSYDNKGGKIVSSVHYGSRYNNAAWIGDQMIYGDGDGSFFSPLSGSMDVTAHEMTHGVTQETANLNYENQPGALNESFSDVFGYFNDTEDWDIGEDITVSQPALRSLSNPTKYGQPDNFKNYKNLPNTDAGDYGGVHINSGIPNKAAYNTITSIGVNKAEQIYYRALTVYLTPSSTFKDAKAALIQSARDLYGSQDAASVEAAWNAVGL

SEQ ID NO: 71773 - protein, 300 aa, Bacillus amyloliquefaciens
AATVGTGTTLKGKTVSLNISSENYKYVLRDLSKPTGTQIITYDLQNREYNLPGTLVSSTTNQFTTSSQRAAVDAHYNLGKVYDYFYQKFNRNSYDNKGGKIVSSVHYGSRYNNAAWIGDQMIYGDGDGSFFSPLSGSMDVTAHEMTHGVTQETANLNYENQPGALNESFSDVFGYFNDTEDWDIGEDITVSQPALRSLSNPTKYGQPDNFKNYKNLPNTDAGDYGGVHTNSGIPNKAAYNTITKIGVNKAEQIYYRALTVYLTPSSTFKDAKAALIQSARDLYGSQDAASVEAAWNAVGL

SEQ ID NO: 71774 - protein, 300 aa, Bacillus amyloliquefaciens
AATTGTGTTLKGKTVSLNISSESGKYVLRDLSKPTGTQIITYDLQNREYNLPGTLVSSTTNQFTTSSQRAAVDAHYNLGKVYDYFYQKFNRNSYDNKGGKIVSSVHYGSRYNNAAWIGDQMIYGDGDGSFFSPLSGSMDVTAHEMTHGVTQETANLNYVNQPGALNESFSDVFGYFNDTEDWDIGEDITVSQPALRSLSNPTKYGQPDNFKNYKNLPNTDAGDYGGVHTNSGIPNKAAYNTITKIGVNKAEQIYYRALTVYLTPSSTFKDAKAALIQSARDFYGSKDAASVEAAWNAVGL

SEQ ID NO: 71775 - protein, 300 aa, Bacillus amyloliquefaciens
AATTGTGTTLKGKTVSLNISSESGKYVLRDLSKPTGTQIITYDLQNREYNLPGTLVSSTTNQFTTSSQRAAVDAHYNLGKVYDYFYQKFNRNSYDNKGGKIVSSVHYGSRYNNAAWIGDQMIYGDGDGSFFSPLSGSMDVTAHEMTHGVTQETANLNYENQPGALNESFSDVFGYFNDTEDWDIGEDITVSQPALRSLSNPSKYGQPDNFKNYKNLPNTDAGDYGGVHTNSGIPNKAAYNTITKIGVNKAEQIYYRALTVYLWPSSTFKDAKHALIQSARDLYGSQDAASVEAAWNAVGL

SEQ ID NO: 71776 - protein, 300 aa, Bacillus amyloliquefaciens
AATTGTGTTLKGKTVSLNISSESGKYVLRDLSKPTGTQIITYDLQQREYYLPGHLVSSTTNQFTTSSQRAAVDAHYNLGKVYDYFYQKFNRNSYDNKGGKIVSSVHYGSRYNNAAWIGDQMIYGDGDGSFFSPLSGSMDVTAHEMTHGVTQETANLNYENQPGALNESFSDVFGYFNDTEDWDIGEDITVSQPALRSLSNPTKYGQPDNFKNYKNLPNTDAGDYGGVHTNSGIPNKAAYNTITKIGVNKAEQIYYRALTVYLTPSSTFKDAKAALIQSARDLYGSQDAASVEAAWNAVGL

SEQ ID NO: 71777 - protein, 300 aa, Bacillus amyloliquefaciens
AATTGTGTTLKGKTVSLNISSESGKYVLRDLSKPTGTQIITYDLQQREYFLPGLLVSSTTNQFTTSSQRAAVDAHYNLGKVYDYFYQKFNRNSYDNKGGKIVSSVHYGSRYNNAAWIGDQMIYGDGDGSFFSPLSGSMDVTAHEMTHGVTQETANLNYENQPGALNESFSDVFGYFNDTEDWDIGEDITVSQPALRSLSNPTKYGQPDNFKNYKNLPNTDAGDYGGVHTNSGIPNKAAYNTITKIGVNKAEQIYYRALTVYLTPSSTFKDAKAALIQSARDLYGSQDAASVEAAWNAVGL

SEQ ID NO: 71778 - protein, 300 aa, Bacillus amyloliquefaciens
AATTGTGTTLKGKTVSLNISSESGKYVLRDLSKPTGTQIITYDLQNREYNLPGTLVSSTTNQFTTSSQRAAVDAHYNLGKVYDYFYQKFNRNSYDNKGGKIVSSVHYGSRYNNAAWIGDQMIYGDGDGSFFSPLSGSMDVTAHEMTHGVTQETANLNYENQPGALNESFSDVFGYFNDTEDWDIGEDITVSQPALRSLSNPTKYGQPDNFKNYKNLPNTDAGDYGGVHTNSGIPNKAAYNTITKIGVNKAEQIYYRALTVYLTPPSTFKDAKAALIQSARDFYGSPDAASVEAAWNAVGL

SEQ ID NO: 71779 - protein, 300 aa, Bacillus amyloliquefaciens
AATVGTGTTLKGKTVSLNISSEYWKYVLRDLSKPTGTQIITYDLQNREYNLPGTLVSSTTNQFTTSSQRAAVDAHYNLGKVYDYFYQKFNRNSYDNKGGKIVSSVHYGSRYNNAAWIGDQMIYGDGDGSFFSPLSGSMDVTAHEMTHGVTQETANLNYENQPGALNESFSDVFGYFNDTEDWDIGEDITVSQPALRSLSNPTKYGQPDNFKNYKNLPNTDAGDYGGVHTNSGIPNKAAYNTITKIGVNKAEQIYYRALTVYLTPSSTFKDAKAALIQSARDLYGSQDAASVEAAWNAVGL

SEQ ID NO: 71780 - protein, 300 aa, Bacillus amyloliquefaciens
AATVGTGTTLKGKTVSLNISSENWKYVLRDLSKPTGTQIITYDLQNREYNLPGTLVSSTTNQFTTSSQRAAVDAHYNLGKVYDYFYQKFNRNSYDNKGGKIVSSVHYGSRYNNAAWIGDQMIYGDGDGSFFSPLSGSMDVTAHEMTHGVTQETANLNYENQPGALNESFSDVFGYFNDTEDWDIGEDITVSQPALRSLSNPTKYGQPDNFKNYKNLPNTDAGDYGGVHTNSGIPNKAAYNTITKIGVNKAEQIYYRALTVYLTPSSTFKDAKAALIQSARDLYGSQDAASVEAAWNAVGL

SEQ ID NO: 71781 - protein, 300 aa, Bacillus amyloliquefaciens
AATTGTGTTLKGKTVSLNISSESGKYVLRDLSKPTGTQIITYDLQQREYFLPGKLVSSTTNQFTTSSQRAAVDAHYNLGKVYDYFYQKFNRNSYDNKGGKIVSSVHYGSRYNNAAWIGDQMIYGDGDGSFFSPLSGSMDVTAHEMTHGVTQETANLNYENQPGALNESFSDVFGYFNDTEDWDIGEDITVSQPALRSLSNPTKYGQPDNFKNYKNLPNTDAGDYGGVHTNSGIPNKAAYNTITKIGVNKAEQIYYRALTVYLTPSSTFKDAKAALIQSARDLYGSQDAASVEAAWNAVGL

SEQ ID NO: 71782 - protein, 300 aa, Bacillus amyloliquefaciens
AATTGTGTTLKGKTVSLNISSESGKYVLRDLSKPTGTQIITYDLQKREYFLPGKLVSSTTNQFTTSSQRAAVDAHYNLGKVYDYFYQKFNRNSYDNKGGKIVSSVHYGSRYNNAAWIGDQMIYGDGDGSFFSPLSGSMDVTAHEMTHGVTQETANLNYENQPGALNESFSDVFGYFNDTEDWDIGEDITVSQPALRSLSNPTKYGQPDNFKNYKNLPNTDAGDYGGVHTNSGIPNKAAYNTITKIGVNKAEQIYYRALTVYLTPSSTFKDAKAALIQSARDLYGSQDAASVEAAWNAVGL

SEQ ID NO: 71783 - protein, 300 aa, Bacillus amyloliquefaciens
AATTGTGTTLKGKTVSLNISSESGKYVLRDLSKPTGTQIITYDLQNKEYYLPGHLVSSTTNQFTTSSQRAAVDAHYNLGKVYDYFYQKFNRNSYDNKGGKIVSSVHYGSRYNNAAWIGDQMIYGDGDGSFFSPLSGSMDVTAHEMTHGVTQETANLNYENQPGALNESFSDVFGYFNDTEDWDIGEDITVSQPALRSLSNPTKYGQPDNFKNYKNLPNTDAGDYGGVHTNSGIPNKAAYNTITKIGVNKAEQIYYRALTVYLTPSSTFKDAKAALIQSARDLYGSQDAASVEAAWNAVGL

SEQ ID NO: 71784 - protein, 300 aa, Bacillus amyloliquefaciens
AATTGTGTTLKGKTVSLNISSESGKYVLRDLSKPTGTQIITYDLQQREYNLPGHLVSSTTNQFTTSSQRAAVDAHYNLGKVYDYFYQKFNRNSYDNKGGKIVSSVHYGSRYNNAAWIGDQMIYGDGDGSFFSPLSGSMDVTAHEMTHGVTQETANLNYENQPGALNESFSDVFGYLNDTEDWDIGEDITVSQPALRSLSNPTKYGQPDNFKNYKNLPNTDAGDYGGVHTNSGIPNKAAYNTITKIGVNKAEQIYYRALTVYLTPSSTFKDAKAALIQSARDLYGSQDAASVEAAWNAVGL

SEQ ID NO: 71785 - protein, 300 aa, Bacillus amyloliquefaciens
AATTGTGTTLKGKTVSLNISSESGKYVLRDLSKPTGTQIITYDLQNREYNLPGTLVSSTTNQFTTSSQRAAVDAHYNLGKVYDYFYQKFNRNSYDNKGGKIVSSVHYGSRYNNAAWIGDQMIYGDGDGSFFSPLSGSMDVTAHEMTHGVTQETANLNYENQPGALNESFSDVFGYFNDTEDWDIGEDITVSQPALRSLSNPTKYGQPDNFKNYKNLPNTDAGDYGGVHTNSGIPNKAAYNTITKIGVNKAEQIYYRALTVYLWPSSTFKDAKHALIQSARDLYGRQDAASVEAAWNAVGL

SEQ ID NO: 71786 - protein, 300 aa, Bacillus amyloliquefaciens
AATTGTGTTLKGKTVSLNISSESGKYVLRDLSKPTGTQIITYDLQNREYNLPGTLVSSTTNQFTTSSQRAAVDAHYNLGKVYDYFYQKFNRNSYDNKGGKIVSSVHYGSRYNNAAWIGDQMIYGDGDGSFFSPLSGSMDVTAHEMTHGVTQETANLNYENQPGALNESFSDVFGYFNDTEDWDIGEDITVSQPALRSLSNPTKYGQPDNFKNYKNLPNTDAGDYGGVHSNSGIPNKAAYNTITKIGVNKAEQIYYRALTVYLTPSSTFKDAKAALIQSARDMYGSRDAASVEAAWNAVGL

SEQ ID NO: 71787 - protein, 300 aa, Bacillus amyloliquefaciens
AATTGTGTTLKGKTVSLNISSESGKYVLRDLSKPTGTQIITYDLQNREYNLPGTLVSSWTNQFTTQSQRTAVDAHYNLGKVYDYFYQKFNRNSYDNKGGKIVSSVHYGSRYNNAAWIGDQMIYGDGDGSFFSPLSGSMDVTAHEMTHGVTQETANLNYENQPGALNESFSDVFGYFNDTEDWDIGEDITVSQPALRSLSNPTKYGQPDNFKNYKNLPNTDAGDYGGVHTNSGIPNKAAYNTITKIGVNKAEQIYYRALTVYLTPSSTFKDAKAALIQSARDLYGSQDAASVEAAWNAVGL

SEQ ID NO: 71788 - protein, 300 aa, Bacillus amyloliquefaciens
AATTGTGTTLKGKTVSLNISSESGKYVLRDLSKPTGTQIITYDLQNREYNLPGTLVSSTTNQFTTSSQRAAVDAHYNLGKVYDYFYQKFNRNSYDNKGGKIVSSVHYGSRYNNAAWIGDQMIYGDGDGSFFSPLSGSMDVTAHEMTHGVTQETANLNYENQPGALNESFSDVFGYFNDTEDWDIGEDITVSQPALRSLSNPTKYGQPDNFKNYKNLPNTDAGDYGGVHTNSGIPNKAAYNTITKIGVNKAEQIYYRALTVYLHPSSTFKDAKHALIQSARDLYGRQDAASVEAAWNAVGL

SEQ ID NO: 71789 - protein, 300 aa, Bacillus amyloliquefaciens
AATTGTGTTLKGKTVSLNISSESGKYVLRDLSKPTGTQIITYDLQNREYNLPGTLVSSTTNQFTTSSQRAAVDAHYNLGKVYDYFYQKFNRNSYDNKGGKIVSSVHYGSRYNNAAWIGDQMIYGDGDGSFFSPLSGSMDVTAHEMTHGVTQETANLNYENQPGALNESFSDVFGYFNDTEDWDIGEDITVSQPALRSLSNPTKYGQPDNFKNYKNLPNTDAGDYGGVHTNSGIPNKAAYNTITKIGVNKAEQIYYRALTVYLTPSSTFKDAKAALIQSARDMYGSPDARSVEAAWNAVGL

SEQ ID NO: 71790 - protein, 300 aa, Bacillus amyloliquefaciens
AATTGTGTTLKGKTVSLNISSESGKYVLRDLSKPTGTQIITYDLQNREYNLPGTLVSSWTNQFTTNSQRAAVDAHYNLGKVYDYFYQKFNRNSYDNKGGKIVSSVHYGSRYNNAAWIGDQMIYGDGDGVFFSPLSGSMDVTAHEMTHGVTQETANLNYENQPGALNESFSDVFGYFNDTEDWDIGEDITVSQPALRSLSNPTKYGQPDNFKNYKNLPNTDAGDYGGVHTNSGIPNKAAYNTITKIGVNKAEQIYYRALTVYLTPSSTFKDAKAALIQSARDLYGSQDAARVEAAWNAVGL

SEQ ID NO: 71791 - protein, 300 aa, Bacillus amyloliquefaciens
AATVGTGTTLKGKTVSLNISSEWYKYVLRDLSKPTGTQIITYDLQNREYNLPGTLVSSTTNQFTTSSQRAAVDAHYNLGKVYDYFYQKFNRNSYDNKGGKIVSSVHYGSRYNNAAWIGDQMIYGDGDGSFFSPLSGSMDVTAHEMTHGVTQETANLNYENQPGALNESFSDVFGYFNDTEDWDIGEDITVSQPALRSLSNPTKYGQPDNFKNYKNLPNTDAGDYGGVHTNSGIPNKAAYNTITKIGVNKAEQIYYRALTVYLTPSSTFKDAKAALIQSARDLYGSQDAASVEAAWNAVGL

SEQ ID NO: 71792 - protein, 300 aa, Bacillus amyloliquefaciens
AATTGTGTTLKGKTVSLNISSESGKYVLRDLSKPTGTQIITYDLQQKEYNLPGHLVSSTTNQFTTSSQRAAVDAHYNLGKVYDYFYQKFNRNSYDNKGGKIVSSVHYGSRYNNAAWIGDQMIYGDGDGSFFSPLSGSMDVTAHEMTHGVTQETANLNYENQPGALNESFSDVFGYFNDTEDWDIGEDITVSQPALRSLSNPTKYGQPDNFKNYKNLPNTDAGDYGGVHTNSGIPNKAAYNTITKIGVNKAEQIYYRALTVYLTPSSTFKDAKAALIQSARDLYGSQDAASVEAAWNAVGL

SEQ ID NO: 71793 - protein, 300 aa, Bacillus amyloliquefaciens
AATTGTGTTLKGKTVSLNISSESGKYVLRDLSKPTGTQIITYDLQNREYNLPGTLVSSTTNQFTTSSQRAAVDAHYNLGKVYDYFYQKFNRNSYDNKGGKIVSSVHYGSRYNNAAWIGDQMIYGDGDGSFFSPLSGSMDVTAHEMTHGVTQETANLNYENQPGALNESFSDVFGYFNDTEDWDIGEDITVSQPALRSLSNPTKYGQPDNFKNYKNLPNTDAGDYGGVHTNSGIPNKAAYNTITKIGVNKAEQIYYRALTVYLWPSSTFKDAKHALIQSARDLYGPQDAASVEAAWNAVGL

SEQ ID NO: 71794 - protein, 300 aa, Bacillus amyloliquefaciens
AATTGTGTTLKGKTVSLNISSESGKYVLRDLSKPTGTQIITYDLQNREYNLPGTLVSSTTNQFTTSSQRAAVDAHYNLGKVYDYFYQKFNRNSYDNKGGKIVSSVHYGSRYNNAAWIGDQMIYGDGDGSFFSPLSGSMDVTAHEMTHGVTQETANLNYENQPGALNESFSDVFGYFNDTEDWDIGEDITVSQPALRSLSNPTKYGQPDNFKNYKNLPNTDAGDYGGVHTNSGIPNKAAYNTITKIGVNKAEQIYYRALTVYLTPSSTFKDAKAALIQSARDFYGSRDARSVEAAWNAVGL

SEQ ID NO: 71795 - protein, 300 aa, Bacillus amyloliquefaciens
AATTGTGTTLKGKTVSLNISSESGKYVLRDLSKPTGTQIITYDLQNREYNLPGTLVSSTTNQFTTSSQRAAVDAHYNLGKVYDYFYQKFNRNSYDNKGGKIVSSVHYGSRYNNAAWIGDQMIYGDGDGSFFSPLSGSMDVTAHEMTHGVTQETANLNYENQPGALNESFSDVFGYFNDTEDWDIGEDITVSQPALRSLSNPTKYGQPDNFKNYKNLPNTDAGDYGGVHTNSGIPNKAAYNTITKIGVNKAEQIYYRALTVYLHPSSTFKDAKHALIQSARDLYGPQDAASVEAAWNAVGL

SEQ ID NO: 71796 - protein, 300 aa, Bacillus amyloliquefaciens
AATTGTGTTLKGKTVSLNISSESKKYVLRDLSKPTGTQIITYDLQNREYNLPGTLVSSTTNQFTTSSQRAAVDAHYNLGKVYDYFYQKFNRNSYDNKGGKIVSSVHYGSRYNNAAWIGDQMIYGDGDGSFFSPLSGSMDVTAHEMTHGVTQETANLNYENQPGALNESFSDVFGYFNDTEDWDIGEDITVSQPALRSLSNPTKYGQPDNFKNYKNLPNTEAGDYGGVHINSGIPNKAAYNTITKIGVNKAEQIYYRALTVYLTPSSTFTDAKAALIQSARDLYGSQDAASVEAAWNAVGL

SEQ ID NO: 71797 - protein, 300 aa, Bacillus amyloliquefaciens
AATTGTGTTLKGKTVSLNISSESGKYVLRDLSKPTGTQIITYDLQQREYFLPGHLVSSTTNQFTTSSQRAAVDAHYNLGKVYDYFYQKFNRNSYDNKGGKIVSSVHYGSRYNNAAWIGDQMIYGDGDGSFFSPLSGSMDVTAHEMTHGVTQETANLNYENQPGALNESFSDVFGYFNDTEDWDIGEDITVSQPALRSLSNPTKYGQPDNFKNYKNLPNTDAGDYGGVHTNSGIPNKAAYNTITKIGVNKAEQIYYRALTVYLTPSSTFKDAKAALIQSARDLYGSQDAASVEAAWNAVGL

SEQ ID NO: 71798 - protein, 300 aa, Bacillus amyloliquefaciens
AATVGTGTTLKGKTVSLNISSENMKYVLRDLSKPTGTQIITYDLQNREYNLPGTLVSSTTNQFTTSSQRAAVDAHYNLGKVYDYFYQKFNRNSYDNKGGKIVSSVHYGSRYNNAAWIGDQMIYGDGDGSFFSPLSGSMDVTAHEMTHGVTQETANLNYENQPGALNESFSDVFGYFNDTEDWDIGEDITVSQPALRSLSNPTKYGQPDNFKNYKNLPNTDAGDYGGVHTNSGIPNKAAYNTITKIGVNKAEQIYYRALTVYLTPSSTFKDAKAALIQSARDLYGSQDAASVEAAWNAVGL

SEQ ID NO: 71799 - protein, 300 aa, Bacillus amyloliquefaciens
AATTGTGTTLKGKTVSLNISSESGKYVLRDLSKPTGTQIITYDLKNREYNLPGTLVSSTTNQFTTSSQRAAVDAHYNLGKVYDYFYQKFNRNSYDNKGGKIVSSVHYGSRYNNAAWIGDQMIYGDGDGSFFSPLSGSMDVTAHEMTHGVTQETANLNYENQPGALNESFSDVFGYFNDTEDWDIGEDITVSQPALRSLENPTKYGQPDNFKNYKNLPNTDAGDYGGVHINSGIPNKAAYNTITKIGVNKAEQIYYRALTVYLTPSSTFKDAKAALIQSARDLYGSQDAASVEAAWNAVGL

SEQ ID NO: 71800 - protein, 300 aa, Bacillus amyloliquefaciens
AATTGTGTTLKGKTVSLNISSEWYKYVLRDLSKPTGTQIITYDLQNREYNLPGTLVSSTTNQFTTSSQRAAVDAHYNLGKVYDYFYQKFNRNSYDNKGGKIVSSVHYGSRYNNAAWIGDQMIYGDGDGSFFSPLSGSMDVTAHEMTHGVTQETANLNYENQPGALNESFSDVFGYFNDTEDWDIGEDITVSQPALRSLSNPTKYGQPDNFKNYKNLPNTDAGDYGGVHTNSGIPNKAAYNTITKIGVNKAEQIYYRALTVYLTPSSTFKDAKAALIQSARDLYGSQDVASVEAAWNAVGL

SEQ ID NO: 71801 - protein, 300 aa, Bacillus amyloliquefaciens
AATVGTGTTLKGKTVSLNISSEWWKYVLRDLSKPTGTQIITYDLQNREYNLPGTLVSSTTNQFTTSSQRAAVDAHYNLGKVYDYFYQKFNRNSYDNKGGKIVSSVHYGSRYNNAAWIGDQMIYGDGDGSFFSPLSGSMDVTAHEMTHGVTQETANLNYENQPGALNESFSDVFGYFNDTEDWDIGEDITVSQPALRSLSNPTKYGQPDNFKNYKNLPNTDAGDYGGVHTNSGIPNKAAYNTITKIGVNKAEQIYYRALTVYLTPSSTFKDAKAALIQSARDLYGSQDAASVEAAWNAVGL

SEQ ID NO: 71802 - protein, 300 aa, Bacillus amyloliquefaciens
AATLGTGTTLKGKTVSLNISSENYKYVLRDLSKPTGTQIITYDLQNREYNLPGTLVSSTTNQFTTSSQRAAVDAHYNLGKVYDYFYQKFNRNSYDNKGGKIVSSVHYGSRYNNAAWIGDQMIYGDGDGSFFSPLSGSMDVTAHEMTHGVTQETANLNYENQPGALNESFSDVFGYFNDTEDWDIGEDITVSQPALRSLSNPTKYGQPDNFKNYKNLPNTDAGDYGGVHTNSGIPNKAAYNTITKIGVNKAEQIYYRALTVYLTPSSTFKDAKAALIQSARDLYGSQDAASVEAAWNAVGL

SEQ ID NO: 71803 - protein, 300 aa, Bacillus amyloliquefaciens
AATSGTGTTLKGKTVSLNISSENMKYVLRDLSKPTGTQIITYDLQNREYNLPGTLVSSTTNQFTTSSQRAAVDAHYNLGKVYDYFYQKFNRNSYDNKGGKIVSSVHYGSRYNNAAWIGDQMIYGDGDGSFFSPLSGSMDVTAHEMTHGVTQETANLNYENQPGALNESFSDVFGYFNDTEDWDIGEDITVSQPALRSLSNPTKYGQPDNFKNYKNLPNTDAGDYGGVHTNSGIPNKAAYNTITKIGVNKAEQIYYRALTVYLTPSSTFKDAKAALIQSARDLYGSQDAASVEAAWNAVGL

SEQ ID NO: 71804 - protein, 300 aa, Bacillus amyloliquefaciens
AATTGTGTTLKGKTVSLNISSESGKYVLRDLSKPTGTQIITYDLQNREYNLPGTLVSSTTNQFTTSSQRAAVDAHYNLGKVYDYFYQKFNRNSYDNKGGKIVSSVHYGSRYNNAAWIGDQMIYGDGDGSFFSPLSGSMDVTAHEMTHGVTQETANLNYENQPGALNESFSDVFGYFNDTEDWDIGEDITVSQPALRSLSNPTKYGQPDNFKNYKNLPNTDAGDYGGVHTNSGIPNKAAYNTITKIGVNKAEQIYYRALTVYLTPSSTFKDAKAALIQSARDMYGSKDARSVEAAWNAVGL

SEQ ID NO: 71805 - protein, 300 aa, Bacillus amyloliquefaciens
AATVGTGTTLKGKTVSLNISSEWMKYVLRDLSKPTGTQIITYDLQNREYNLPGTLVSSTTNQFTTSSQRAAVDAHYNLGKVYDYFYQKFNRNSYDNKGGKIVSSVHYGSRYNNAAWIGDQMIYGDGDGSFFSPLSGSMDVTAHEMTHGVTQETANLNYENQPGALNESFSDVFGYFNDTEDWDIGEDITVSQPALRSLSNPTKYGQPDNFKNYKNLPNTDAGDYGGVHTNSGIPNKAAYNTITKIGVNKAEQIYYRALTVYLTPSSTFKDAKAALIQSARDLYGSQDAASVEAAWNAVGL

SEQ ID NO: 71806 - protein, 300 aa, Bacillus amyloliquefaciens
AATTGTGTTLKGKTVSLNISSESGKYVLRDLSKPTGTQIITYDLQNREYNLPGTLVSSKTNQFTTNSQRAAVDAHYNLGKVYDYFYQEFNRNSYDNKGGKIVSSVHYGSRYNNAAWIGDQMIYGDGDGSFFSPLSGSMDVTAHEMTHGVTQETANLNYENQPGALNESFSDVFGYFNDTEDWDIGEDITVSQPALRSLSNPTKYGQPDNFKNYKNLPNTDAGDYGGVHTNSGIPNKAAYNTITKIGVNKAEQIYYRALTVYLTPSSTFKDAKAALIQSARDLYGSQDAASVEAAWNAVGL

SEQ ID NO: 71807 - protein, 300 aa, Bacillus amyloliquefaciens
AATSGTGTTLKGKTVSLNISSEYWKYVLRDLSKPTGTQIITYDLQNREYNLPGTLVSSTTNQFTTSSQRAAVDAHYNLGKVYDYFYQKFNRNSYDNKGGKIVSSVHYGSRYNNAAWIGDQMIYGDGDGSFFSPLSGSMDVTAHEMTHGVTQETANLNYENQPGALNESFSDVFGYFNDTEDWDIGEDITVSQPALRSLSNPTKYGQPDNFKNYKNLPNTDAGDYGGVHTNSGIPNKAAYNTITKIGVNKAEQIYYRALTVYLTPSSTFKDAKAALIQSARDLYGSQDAASVEAAWNAVGL

SEQ ID NO: 71808 - protein, 300 aa, Bacillus amyloliquefaciens
AATVGTGTTLKGKTVSLNISSEYYKYVLRDLSKPTGTQIITYDLQNREYNLPGTLVSSTTNQFTTSSQRAAVDAHYNLGKVYDYFYQKFNRNSYDNKGGKIVSSVHYGSRYNNAAWIGDQMIYGDGDGSFFSPLSGSMDVTAHEMTHGVTQETANLNYENQPGALNESFSDVFGYFNDTEDWDIGEDITVSQPALRSLSNPTKYGQPDNFKNYKNLPNTDAGDYGGVHTNSGIPNKAAYNTITKIGVNKAEQIYYRALTVYLTPSSTFKDAKAALIQSARDLYGSQDAASVEAAWNAVGL

SEQ ID NO: 71809 - protein, 300 aa, Bacillus amyloliquefaciens
AATTGTGTTLKGKTVSLNISSESGKYVLRDLSKPTGTQIITYDLQQREYFLPGTLVSSTTNQFTTSSQRAAVDAHYNLGKVYDYFYQKFNRNSYDNKGGKIVSSVHYGSRYNNAAWIGDQMIYGDGDGSFFSPLSGSMDVTAHEMTHGVTQETANLNYENQPGALNESFSDVFGYFNDNEDWDIGEDITVSQPALRSLSNPTKYGQPDNFKNYKNLPNTDAGDYGGVHTNSGIPNKAAYNTITKIGVNKAEQIYYRALTVYLTPSSTFKDAKAALIQSARDLYGSQDAASVEAAWNAVGL

SEQ ID NO: 71810 - protein, 300 aa, Bacillus amyloliquefaciens
AATTGTGTTLKGKTVSLNISSESGKYVLRDLSKPTGTQIITYDLQNKEYFLPGLLVSSTTNQFTTSSQRAAVDAHYNLGKVYDYFYQKFNRNSYDNKGGKIVSSVHYGSRYNNAAWIGDQMIYGDGDGSFFSPLSGSMDVTAHEMTHGVTQETANLNYENQPGALNESFSDVFGYFNDTEDWDIGEDITVSQPALRSLSNPTKYGQPDNFKNYKNLPNTDAGDYGGVHTNSGIPNKAAYNTITKIGVNKAEQIYYRALTVYLTPSSTFKDAKAALIQSARDLYGSQDAASVEAAWNAVGL

SEQ ID NO: 71811 - protein, 300 aa, Bacillus amyloliquefaciens
AATTGTGTTLKGKTVSLNISSESGKYVLRDLSKPTGTQIITYDQQNREYNLPGTLVSSTTNQFTTSSQRAAVDAHYNLGKVYDYFYQKFNRNSYDNKGGKIVSSVHYGSRYNNAAWIGDQMIYGDGDGSFFSPLSGSMDVTAHEMTHGVTQETANLNYENQPGALNESFSDVFGYFNDTEDWDIGEDITVSQPALRSLSNPTKYGQPDNFKNYKNLPNTDAGDYGGVHTNSGIPNKAAYNTITKIGVNKAEQIYYRALTVYLWPSSTFKDAKAALIQSARDLYGRQDAASVEAAWNAVGL

SEQ ID NO: 71812 - protein, 300 aa, Bacillus amyloliquefaciens
AATTGTGTTLKGKTVSLNISSESGKYVLRDLSKPTGTQIITYDLQNKEYFLPGHLVSSTTNQFTTSSQRAAVDAHYNLGKVYDYFYQKFNRNSYDNKGGKIVSSVHYGSRYNNAAWIGDQMIYGDGDGSFFSPLSGSMDVTAHEMTHGVTQETANLNYENQPGALNESFSDVFGYFNDTEDWDIGEDITVSQPALRSLSNPTKYGQPDNFKNYKNLPNTDAGDYGGVHTNSGIPNKAAYNTITKIGVNKAEQIYYRALTVYLTPSSTFKDAKAALIQSARDLYGSQDAASVEAAWNAVGL

SEQ ID NO: 71813 - protein, 300 aa, Bacillus amyloliquefaciens
AATTGTGTTLKGKTVSLNISSESGKYVLRDLSKPTGTQIITYDLQNREYNLPGTLVSSTTNQFTTSSQRAAVDAHYNLGKVYDYFYQKFSRNSYDNKGGKIVSSVHYGSRYNNAAWIGDQMIYGDGDGSFFSPLSGSMDVTAHEMTHGVTQETANLNYENQPGALNESFSDVFGYFNDTEDWDIGEDITVSQPALRSLSNPTKYGQPDNFKNYKNLPNTDAGDYGGVHTNSGIPNKAAYNTITKIGVNKAEQIYYRALTVYLTPSSTFKDAKHALIQSARDLYGPQDAASVEAAWNAVGL

SEQ ID NO: 71814 - protein, 300 aa, Bacillus amyloliquefaciens
AATLGTGTTLKGKTVSLNISSENWKYVLRDLSKPTGTQIITYDLQNREYNLPGTLVSSTTNQFTTSSQRAAVDAHYNLGKVYDYFYQKFNRNSYDNKGGKIVSSVHYGSRYNNAAWIGDQMIYGDGDGSFFSPLSGSMDVTAHEMTHGVTQETANLNYENQPGALNESFSDVFGYFNDTEDWDIGEDITVSQPALRSLSNPTKYGQPDNFKNYKNLPNTDAGDYGGVHTNSGIPNKAAYNTITKIGVNKAEQIYYRALTVYLTPSSTFKDAKAALIQSARDLYGSQDAASVEAAWNAVGL

SEQ ID NO: 71815 - protein, 300 aa, Bacillus amyloliquefaciens
AATTGTGTTLKGKTVSLNISSESGKYVLRDLSKPTGTQIITYDLQNREYNLPGTLVSSTTNQFTTSSQRAAVDAHYNLGKVYDYFYQKFKRNSYDNKGGKIVSSVHYGSRYNNAAWIGDQMIYGDGDGSFFSPLSGSMDVTAHEMTHGVTQETANLNYENQPGALNESFSDVFGYFNDTEDWDIGEDITVSQPALRSLSNPTKYGQPDNFKNYQNLPNTDAGDYGGVHINSGIPNKAAYNTITKIGVNKAEQIYYRALTVYLTPSSTFKDAKAALIQSARDLYGSQDAASVEAAWNAVGL

SEQ ID NO: 71816 - protein, 300 aa, Bacillus amyloliquefaciens
AATTGTGTTLKGKTVSLNISSESGKYVLRDLSKPTGTQIITYDLQNREYYLPGTLVSSWTNQFTTNSQRAAVDAHYNLGKVYDYFYQKFNRNSYDNKGGKIVSSVHYGSRYNNAAWIGDQMIYGDGDGVFFSPLSGSMDVTAHEMTHGVTQETANLNYENQPGALNESFSDVFGYFNDTEDWDIGEDITVSQPALRSLSNPTKYGQPDNFKNYKNLPNTDAGDYGGVHTNSGIPNKAAYNTITKIGVNKAEQIYYRALTVYLTPSSTFKDAKAALIQSARDLYGSQDAASVEAAWNAVGL

SEQ ID NO: 71817 - protein, 300 aa, Bacillus amyloliquefaciens
AATTGTGTTLKGKTVSLNISSESGKYVLRDLSKPTGTQIITYDLQNREYNLPGTLVSSTTNQFTTSSQRAAVDAHYNLGKVYDYFYQKFNRNSYDNKGGKIVSSVHYGSRYNNAAWIGDQMIYGDGDGSFFSPLSGSMDVTAHEMTHGVTQETANLNYENQPGALNESFSDVFGYFNDTEDWDIGEDITVSQPALRSLSNPTKYGQPDNFKNYKNLPNTDAGDYGGVHTNSGIPNKAAYNTITKIGVNKAEQIYYRALTVYLTPPSTFKDAKAALIQSARDMYGSKDAASVEAAWNAVGL

SEQ ID NO: 71818 - protein, 300 aa, Bacillus amyloliquefaciens
AATTGTGTTLKGKTVSLNISSESGKYVLRDLSKPTGTQIITYDLQNREYNLPGTLVSSTTNQFTTSSQRAAVDAHYNLGKVYDYFYQKFNRNSYDNKGGKIVSSVHYGSRYNNAAWIGDQMIYGDGDGSFFSPLSGSMDVTAHEMTHGVTQETANLNYENQPGALNESFSDVYGYFNDTEDWDIGEDITVSQPALRSLSNPTKYGQPDNFKNYKNLPNSDAGDYGGVHTNSGIPNKAAYNTITKIGVNKAEQIYYRALTVYLTPSSTFKDAKAALIQSARDMYGSQDAASVEAAWNAVGL

SEQ ID NO: 71819 - protein, 300 aa, Bacillus amyloliquefaciens
AATTGTGTTLKGKTVSLNISSESGKYVLRDLSKPTGTQIITYDLQNREYNLPGTLVSSRTNQFTTQSQRAAVDAHYNLGKVYDYFYQKFNRNSYDNKGGKIVSSVHYGSRYNNAAWIGDQMIYGDGDGSFFSPLSGSMDVTAHEMTHGVTQETANLNYENQPGALNESFSDVFGYFNDTEDWDIGEDITVSQPALRSLSNPTKYGQPDNFKNYKNLPNTDAGDYGGVHTNSGIPNKAAYNTITKIGVNKAEQIYYRALTVYLTQSSTFKDAKAALIQSARDLYGSQDAASVEAAWNAVGL

SEQ ID NO: 71820 - protein, 300 aa, Bacillus amyloliquefaciens
AATTGTGTTLKGKTVSLNISSESGKYVLRDLSKPTGTQIITYDLQNREYNLPGTLVSSTTNQFTTSSQRAAVDAHYNLGKVYDYFYQKFNRNSYDNKGGKIVSSVHYGSRYNNAAWIGDQMIYGDGDGSFFSPLSGSMDVTAHEMTHGVTQETANLNYENQPGALNESFSDVFGYFNDTEDWDIGEDITVSQPALRSLSNPTKYGQPDNFKNYKNLPNTDAGDYGGVHTNSGIPNKAAYNTITKIGVNKAEQIYYRALTVYLHPSSTFKDAKHALIQSARDLYGWQDAASVEAAWNAVGL

SEQ ID NO: 71821 - protein, 300 aa, Bacillus amyloliquefaciens
AATFGTGTTLKGKTVSLNISSEYMKYVLRDLSKPTGTQIITYDLQNREYNLPGTLVSSTTNQFTTSSQRAAVDAHYNLGKVYDYFYQKFNRNSYDNKGGKIVSSVHYGSRYNNAAWIGDQMIYGDGDGSFFSPLSGSMDVTAHEMTHGVTQETANLNYENQPGALNESFSDVFGYFNDTEDWDIGEDITVSQPALRSLSNPTKYGQPDNFKNYKNLPNTDAGDYGGVHTNSGIPNKAAYNTITKIGVNKAEQIYYRALTVYLTPSSTFKDAKAALIQSARDLYGSQDAASVEAAWNAVGL

SEQ ID NO: 71822 - protein, 300 aa, Bacillus amyloliquefaciens
AATTGTGTTLKGKTVSLNISSESGKYVLRDLSKPTGTQIITYDLQNKEYWLPGHLVSSTTNQFTTSSQRAAVDAHYNLGKVYDYFYQKFNRNSYDNKGGKIVSSVHYGSRYNNAAWIGDQMIYGDGDGSFFSPLSGSMDVTAHEMTHGVTQETANLNYENQPGALNESFSDVFGYFNDTEDWDIGEDITVSQPALRSLSNPTKYGQPDNFKNYKNLPNTDAGDYGGVHTNSGIPNKAAYNTITKIGVNKAEQIYYRALTVYLTPSSTFKDAKAALIQSARDLYGSQDAASVEAAWNAVGL

SEQ ID NO: 71823 - protein, 300 aa, Bacillus amyloliquefaciens
AATTGTGTTLKGKTVSLNISSESGKYVLRDLSKPTGTQIITYDLQNREYNLPGTLVSSTTNQFTTSSQRAAVDAHYNLGKVYDYFYQKFNRNSYDNKGGKIVSSVHYGSRYNNAAWIGDQMIYGDGDGSFFSPLSGSMDVTAHEMTHGVTQETANLNYENQPGALNESFSDVFGYFNDTEDWDIGEDITVSQPALRSLSNPTKYGQPDNFKNYKNLPNTDAGDYGGVHTNSGIPNKAAYNTITKIGVNKAEQIYYRALTVYLTPSSTFKDAKAALIQSARDFYGSKDARSVEAAWNAVGL

SEQ ID NO: 71824 - protein, 300 aa, Bacillus amyloliquefaciens
AATTGTGTTLKGKTVSLNISSESGKYVLRDLSKPTGTQIITYDLQNREYNLPGTLVSSWTNQFTTNSQRTAVDAHYNLGKVYDYFYQKFNRNSYDNKGGKIVSSVHYGSRYNNAAWIGDQMIYGDGDGSFFSPLSGSMDVTAHEMTHGVTQETANLNYENQPGALNESFSDVFGYFNDTEDWDIGEDITVSQPALRSLSNPTKYGQPDNFKNYKNLPNTDAGDYGGVHTNSGIPNKAAYNTITKIGVNKAEQIYYRALTVYLTPSSTFKDAKAALIQSARDLYGSQDAASVEAAWNAVGL

SEQ ID NO: 71825 - protein, 300 aa, Bacillus amyloliquefaciens
AATTGTGTTLKGKTVSLNISSERGKYVLRDLSKPTGTQIITYDLQKREYNLPGRLVSSTTNQFTTSSQRAAVDAHYNLGKVYDYFYQKFNRNSYDNKGGKIVSSVHYGSRYNNAAWIGDQMIYGDGDGSFFSPLSGSMDVTAHEMTHGVTQETANLNYENQPGALNESFSDVFGYFNDTEDWDIGEDITVSQPALRSLSNPTKYGQPDNFKNYKNLPNTDAGDYGGVHTNSGIPNKAAYNTITKIGVNKAEQIYYRALTVYLTPSSTFKDAKAALIQSARDLYGSQDAASVEAAWNAVGL

SEQ ID NO: 71826 - protein, 300 aa, Bacillus amyloliquefaciens
AATSGTGTTLKGKTVSLNISSENWKYVLRDLSKPTGTQIITYDLQNREYNLPGTLVSSTTNQFTTSSQRAAVDAHYNLGKVYDYFYQKFNRNSYDNKGGKIVSSVHYGSRYNNAAWIGDQMIYGDGDGSFFSPLSGSMDVTAHEMTHGVTQETANLNYENQPGALNESFSDVFGYFNDTEDWDIGEDITVSQPALRSLSNPTKYGQPDNFKNYKNLPNTDAGDYGGVHTNSGIPNKAAYNTITKIGVNKAEQIYYRALTVYLTPSSTFKDAKAALIQSARDLYGSQDAASVEAAWNAVGL

SEQ ID NO: 71827 - protein, 300 aa, Bacillus amyloliquefaciens
AATTGTGTTLKGKTVSLNISSESGKYVLRDLSKPTGTQIITYDLQNREYNLPGTLVSSKTNQFTTQSQRAAVDAHYNLGKVYDYFYQKFNRNSYDNKGGKIASSVHYGSRYNNAAWIGDQMIYGDGDGQFFSPLSGSMDVTAHEMTHGVTQETANLNYENQPGALNESFSDVFGYFNDTEDWDIGEDITVSQPALRSLSNPTKYGQPDNFKNYKNLPNTDAGDYGGVHTNSGIPNKAAYNTITKIGVNKAEQIYYRALTVYLTPSSTFKDAKAALIQSARDLYGSQDAASVEAAWNAVGL

SEQ ID NO: 71828 - protein, 300 aa, Bacillus amyloliquefaciens
AATTGTGTTLKGKTVSLNISSESGKYVLRDLSKPTGTQIITYDLQNREYNLPGTLVSSKTNQLTTNSQRAAVDAHYNLGKVYDYFYQKFNRNSYDNKGGKIVSSVHYGSRYNNAAWIGDQMIYGDGDGVFFSPLSGSMDVTAHEMTHGVTQETANLNYENQPGALNESFSDVFGYFNDTEDWDIGEDITVSQPALRSLSNPTKYGQPDNFKNYKNLPNTDAGDYGGVHTNSGIPNKAAYNTITKIGVNKAEQIYYRALTVYLTPSSTFKDAKAALIQSARDLYGSQDAASVEAAWNAVGL

SEQ ID NO: 71829 - protein, 300 aa, Bacillus amyloliquefaciens
AATTGTGTTLKGKTVSLNISSESGKYVLRDLSKPTGTQIITYDLQQKEYWLPGTLVSSTTNQFTTSSQRAAVDAHYNLGKVYDYFYQKFNRNSYDNKGGKIVSSVHYGSRYNNAAWIGDQMIYGDGDGSFFSPLSGSMDVTAHEMTHGVTQETANLNYENQPGALNESFSDVFGYFNDTEDWDIGEDITVSQPALRSLSNPTKYGQPDNFKNYKNLPNTDAGDYGGVHTNSGIPNKAAYNTITKIGVNKAEQIYYRALTVYLTPSSTFKDAKAALIQSARDLYGSQDAASVEAAWNAVGL

SEQ ID NO: 71830 - protein, 300 aa, Bacillus amyloliquefaciens
AATTGTGTTLKGKTVSLNISSESGKYVLRDLSKPTGTQIITYDLQQKEYYLPGTLVSSTTNQFTTSSQRAAVDAHYNLGKVYDYFYQKFNRNSYDNKGGKIVSSVHYGSRYNNAAWIGDQMIYGDGDGSFFSPLSGSMDVTAHEMTHGVTQETANLNYENQPGALNESFSDVFGYFNDTEDWDIGEDITVSQPALRSLSNPTKYGQPDNFKNYKNLPNTDAGDYGGVHTNSGIPNKAAYNTITKIGVNKAEQIYYRALTVYLTPSSTFKDAKAALIQSARDLYGSQDAASVEAAWNAVGL

SEQ ID NO: 71831 - protein, 300 aa, Bacillus amyloliquefaciens
AATTGTGTTLKGKTVSLNISSESGKYVLRDLSKPTGTQIITYDLQNREYNLPGTLVSSTTNQFTTSSQRAAVDAHYNLGKVYDYFYQKFNRNSYDNKGGKIVSSVHYGSRYNNAAWIGDQMIYGDGDGSFFSPLSGSMDVTAHEMTHGVTQETANLNYENQPGALNESFSDVFGYFNDTEDWDIGEDITVSQPALRSLSNPTKYGQPDNFKNYKNLPNTDAGDYGGVHTNSGIPNKAAYNTITKIGVNKAEQIYYRALTVYLTPPSTFKDAKAALIQSARDFYGSQDARSVEAAWNAVGL

SEQ ID NO: 71832 - protein, 300 aa, Bacillus amyloliquefaciens
AATTGTGTTLKGKTVSLNISSESGKYVLRDLSKPTGTQIITYDLQNREYYLPGTLVSSWTNQFTTQSQRAAVDAHYNLGKVYDYFYQKFNRNSYDNKGGKIVSSVHYGSRYNNAAWIGDQMIYGDGDGVFFSPLSGSMDVTAHEMTHGVTQETANLNYENQPGALNESFSDVFGYFNDTEDWDIGEDITVSQPALRSLSNPTKYGQPDNFKNYKNLPNTDAGDYGGVHTNSGIPNKAAYNTITKIGVNKAEQIYYRALTVYLTPSSTFKDAKAALIQSARDLYGSQDAASVEAAWNAVGL

SEQ ID NO: 71833 - protein, 300 aa, Bacillus amyloliquefaciens
AATSGTGTTLKGKTVSLNISSEWMKYVLRDLSKPTGTQIITYDLQNREYNLPGTLVSSTTNQFTTSSQRAAVDAHYNLGKVYDYFYQKFNRNSYDNKGGKIVSSVHYGSRYNNAAWIGDQMIYGDGDGSFFSPLSGSMDVTAHEMTHGVTQETANLNYENQPGALNESFSDVFGYFNDTEDWDIGEDITVSQPALRSLSNPTKYGQPDNFKNYKNLPNTDAGDYGGVHTNSGIPNKAAYNTITKIGVNKAEQIYYRALTVYLTPSSTFKDAKAALIQSARDLYGSQDAASVEAAWNAVGL

SEQ ID NO: 71834 - protein, 300 aa, Bacillus amyloliquefaciens
AATSGTGTTLKGKTVSLNISSEYMKYVLRDLSKPTGTQIITYDLQNREYNLPGTLVSSTTNQFTTSSQRAAVDAHYNLGKVYDYFYQKFNRNSYDNKGGKIVSSVHYGSRYNNAAWIGDQMIYGDGDGSFFSPLSGSMDVTAHEMTHGVTQETANLNYENQPGALNESFSDVFGYFNDTEDWDIGEDITVSQPALRSLSNPTKYGQPDNFKNYKNLPNTDAGDYGGVHTNSGIPNKAAYNTITKIGVNKAEQIYYRALTVYLTPSSTFKDAKAALIQSARDLYGSQDAASVEAAWNAVGL

SEQ ID NO: 71835 - protein, 300 aa, Bacillus amyloliquefaciens
AATTGTGTTLKGKTVSLNISSESGKYVLRDLSKPTGTQIITYDLQNKEYYLPGLLVSSTTNQFTTSSQRAAVDAHYNLGKVYDYFYQKFNRNSYDNKGGKIVSSVHYGSRYNNAAWIGDQMIYGDGDGSFFSPLSGSMDVTAHEMTHGVTQETANLNYENQPGALNESFSDVFGYFNDTEDWDIGEDITVSQPALRSLSNPTKYGQPDNFKNYKNLPNTDAGDYGGVHTNSGIPNKAAYNTITKIGVNKAEQIYYRALTVYLTPSSTFKDAKAALIQSARDLYGSQDAASVEAAWNAVGL

SEQ ID NO: 71836 - protein, 300 aa, Bacillus amyloliquefaciens
AATTGTGTTLKGKTVSLNISSESGKYVLRDLSKPTGTQIITYDLQNREYNLPGTLVSSTTNQFTTSSQRAAVDAHYNLGKVYDYFYQKFNRNSYDNKGGKIVSSVHYGSRYNNAAWIGDQMIYGDGDGSFFSPLSGSMDVTAHEMTHGVTQETANLNYENQPGALNESFSDVFGYFNDTEDWDIGEDITVSQPALRSLSNPTKYGQPDNFKNYKNLPNTDAGDYGGVHTNSGIPNKAAYNTITKIGVNKAEQIYYRALTVYLTPSSTFKDAKAALIQSARDMYGSRDARSVEAAWNAVGL

SEQ ID NO: 71837 - protein, 300 aa, Bacillus amyloliquefaciens
AATVGTGTTLKGKTVSLNISSEYMKYVLRDLSKPTGTQIITYDLQNREYNLPGTLVSSTTNQFTTSSQRAAVDAHYNLGKVYDYFYQKFNRNSYDNKGGKIVSSVHYGSRYNNAAWIGDQMIYGDGDGSFFSPLSGSMDVTAHEMTHGVTQETANLNYENQPGALNESFSDVFGYFNDTEDWDIGEDITVSQPALRSLSNPTKYGQPDNFKNYKNLPNTDAGDYGGVHTNSGIPNKAAYNTITKIGVNKAEQIYYRALTVYLTPSSTFKDAKAALIQSARDLYGSQDAASVEAAWNAVGL

SEQ ID NO: 71838 - protein, 300 aa, Bacillus amyloliquefaciens
AATTGTGTTLKGKTVSLNISSESGKYVLRDLSKPTGTQIITYDLQNREYYLPGTLVSSKTNQFTTQSQRAAVDAHYNLGKVYDYFYQKFNRNSYDNKGGKIVSSVHYGSRYNNAAWIGDQMIYGDGDGSFFSPLSGSMDVTAHEMTHGVTQETANLNYENQPGALNESFSDVFGYFNDTEDWDIGEDITVSQPALRSLSNPTKYGQPDNFKNYKNLPNTDAGDYGGVHTNSGIPNKAAYNTITKIGVNKAEQIYYRALTVYLTPSSTFKDAKAALIQSARDLYGSQDAASVEAAWNAVGL

SEQ ID NO: 71839 - protein, 300 aa, Bacillus amyloliquefaciens
AATTGTGTTLKGKTVSLNISSESGKYVLRDLSKPTGTQIITYDLQNREYNLPGTLVSSTTNQFTTSSQRAAVDAHYNLGKVYDYFYQKFNRNSYDNKGGKIVSSVHYGSRYNNAAWIGDQMIYGDGDGSFFSPLSGSMDVTAHEMTHGVTQETANLNYENQPGALNESFSDVFGYFNDTEDWDIGEDITVSQPALRSLSNPTKYGQPDNFKNYKNLPNTDAGDYGGVHTNSGIPNKAAYNTITKIGVNKAEQIYYRALTVYLTPSSTFKDAKAALIQSARDFYGSPDARSVEAAWNAVGL

SEQ ID NO: 71840 - protein, 300 aa, Bacillus amyloliquefaciens
AATTGTGTTLKGKTVSLNISSESGKYVLRDLSKPTGTQIITYDLQQREYWLPGHLVSSTTNQFTTSSQRAAVDAHYNLGKVYDYFYQKFNRNSYDNKGGKIVSSVHYGSRYNNAAWIGDQMIYGDGDGSFFSPLSGSMDVTAHEMTHGVTQETANLNYENQPGALNESFSDVFGYFNDTEDWDIGEDITVSQPALRSLSNPTKYGQPDNFKNYKNLPNTDAGDYGGVHTNSGIPNKAAYNTITKIGVNKAEQIYYRALTVYLTPSSTFKDAKAALIQSARDLYGSQDAASVEAAWNAVGL

SEQ ID NO: 71841 - protein, 300 aa, Bacillus amyloliquefaciens
AATLGTGTTLKGKTVSLNISSEWWKYVLRDLSKPTGTQIITYDLQNREYNLPGTLVSSTTNQFTTSSQRAAVDAHYNLGKVYDYFYQKFNRNSYDNKGGKIVSSVHYGSRYNNAAWIGDQMIYGDGDGSFFSPLSGSMDVTAHEMTHGVTQETANLNYENQPGALNESFSDVFGYFNDTEDWDIGEDITVSQPALRSLSNPTKYGQPDNFKNYKNLPNTDAGDYGGVHTNSGIPNKAAYNTITKIGVNKAEQIYYRALTVYLTPSSTFKDAKAALIQSARDLYGSQDAASVEAAWNAVGL

SEQ ID NO: 71842 - protein, 300 aa, Bacillus amyloliquefaciens
AATLGTGTTLKGKTVSLNISSEWYKYVLRDLSKPTGTQIITYDLQNREYNLPGTLVSSTTNQFTTSSQRAAVDAHYNLGKVYDYFYQKFNRNSYDNKGGKIVSSVHYGSRYNNAAWIGDQMIYGDGDGSFFSPLSGSMDVTAHEMTHGVTQETANLNYENQPGALNESFSDVFGYFNDTEDWDIGEDITVSQPALRSLSNPTKYGQPDNFKNYKNLPNTDAGDYGGVHTNSGIPNKAAYNTITKIGVNKAEQIYYRALTVYLTPSSTFKDAKAALIQSARDLYGSQDAASVEAAWNAVGL

SEQ ID NO: 71843 - protein, 300 aa, Bacillus amyloliquefaciens
AATKGTGTTLKGKTVSLNISSESGKYVLRDLSKPTGTQIITYDLQNREYNLPGTLVSSTTNQFTTSSQRAAVDAHYNLGKVYDYFYQKFNRNSYDNKGGKIVSSVHYGSRYNNAAWIGDQMIYGDGDGSFFSPLSGSMDVTAHEMTHGVTQETANLNYENQPGALNESFSDVFGYFNDTEDWDIGEDITVSQPALRSLSNPTKYGQPDNFKNYKNLPNTDAGDYGGVHINSGIPNKAAYNTITKIGVNKAEQIYYRALTVYLTPSSTFKDAKAALIQSALDLYGSQDAASVEAAWNAVGL

SEQ ID NO: 71844 - protein, 300 aa, Bacillus amyloliquefaciens
AATSGTGTTLKGKTVSLNISSEWYKYVLRDLSKPTGTQIITYDLQNREYNLPGTLVSSTTNQFTTSSQRAAVDAHYNLGKVYDYFYQKFNRNSYDNKGGKIVSSVHYGSRYNNAAWIGDQMIYGDGDGSFFSPLSGSMDVTAHEMTHGVTQETANLNYENQPGALNESFSDVFGYFNDTEDWDIGEDITVSQPALRSLSNPTKYGQPDNFKNYKNLPNTDAGDYGGVHTNSGIPNKAAYNTITKIGVNKAEQIYYRALTVYLTPSSTFKDAKAALIQSARDLYGSQDAASVEAAWNAVGL

SEQ ID NO: 71845 - protein, 300 aa, Bacillus amyloliquefaciens
AATTGTGTTLKGKTVSLNISSESGKYVLRDLSKPTGTQIITYDLQNKEYWLPGKLVSSTTNQFTTSSQRAAVDAHYNLGKVYDYFYQKFNRNSYDNKGGKIVSSVHYGSRYNNAAWIGDQMIYGDGDGSFFSPLSGSMDVTAHEMTHGVTQETANLNYENQPGALNESFSDVFGYFNDTEDWDIGEDITVSQPALRSLSNPTKYGQPDNFKNYKNLPNTDAGDYGGVHTNSGIPNKAAYNTITKIGVNKAEQIYYRALTVYLTPSSTFKDAKAALIQSARDLYGSQDAASVEAAWNAVGL

SEQ ID NO: 71846 - protein, 300 aa, Bacillus amyloliquefaciens
AATSGTGTTLKGKTVSLNISSEWWKYVLRDLSKPTGTQIITYDLQNREYNLPGTLVSSTTNQFTTSSQRAAVDAHYNLGKVYDYFYQKFNRNSYDNKGGKIVSSVHYGSRYNNAAWIGDQMIYGDGDGSFFSPLSGSMDVTAHEMTHGVTQETANLNYENQPGALNESFSDVFGYFNDTEDWDIGEDITVSQPALRSLSNPTKYGQPDNFKNYKNLPNTDAGDYGGVHTNSGIPNKAAYNTITKIGVNKAEQIYYRALTVYLTPSSTFKDAKAALIQSARDLYGSQDAASVEAAWNAVGL

SEQ ID NO: 71847 - protein, 301 aa, Bacillus amyloliquefaciens
AATTGTGTTLKGKTVSLNISSESGKYVLRDLSKPTGTQIITYDLQNREYNLPGTLVSSTTNQFTTSSQRAAVDAHYNLGKVYDYFYQKFNRNSYDNKGGKIVSSVHYGSRYNNAAWIGDQMIYGDGDGSFFSPLSGSMDVTAHEMTHGVTQETANLNYENQPGALNESFSDVFGYFNDTEDWDIGEDITVSQPALRSLSNPTKYGQPDNFKNYKNLPNTDAGDYGGVHTNSGIPNKAAYNTITKIGVNKAEQIYYRALTVYLTPPSTFKDAKAALIQSARDFYGPQDARASVEAAWNAVGL

SEQ ID NO: 71848 - protein, 300 aa, Bacillus amyloliquefaciens
AATVGTGTTLKGKTVSLNISSEWMKYVLRDLSKPTGTQIITYDLQNREYNLPGTLVSSTTNQFTTSSQRAAVDAHYNLGKVYDYFYQKFNRNSYDNKGGKIVSSVHYGSRYNNAAWIGDQMIYGDGDGSFFSPLSGSMDVTAHEMTHGVTQETANLNYENQPGALNESFSDVFGYFNDTEDWDIGEDITVSQPALRSLSNPTKYGQPDNFKNYKNLPNTDAGDYGGVHTNSGIPNKAAYNTITKIGVNKAEQIYYRALTVYLTPSSTFKDAKAALIQSARDLYGSQDAVSVEAAWNAVGL

SEQ ID NO: 71849 - protein, 300 aa, Bacillus amyloliquefaciens
AATTGTGTTLKGKTVSLNISSESGKYVLRDLSKPTGTQIITYDLQNREYNLPGTLVSSTTNQFTTSSQRAAVDAHYNLGKVYDYFYQKFNRNSYDNKGGKIVSSVHYGSRYNNAAWIGDQMIYGDGDGSFFSPLSGSMDVTAHEMTHGVTQETANLNYENQPGALNESFSDVFGYFNDTEDWDIGEDITVSQPALRSLSNPTKYGQPDNFKNYKNLPNTDAGDYGGVHTNSGIPNKAAYNTITKIGVNKAEQIYYRALTVYLTPPSTFKDAKAALIQSARDMYGSPDARSVEAAWNAVGL

SEQ ID NO: 71850 - protein, 300 aa, Bacillus amyloliquefaciens
AATTGTGTTLKGKTVSLNISSESGKYVLRDLSKPTGTQIITYDLQNREYNLPGTLVSSTTNQFTTSSQRAAVDAHYNLGKVYDYFYQKFNRNSYDNKGGKIVSSVHYGSRYINAAWIGDQMIYGDGDGSFFSPLSGSMDVTAHEMTHGVTQETANLNYENQPGALNESFSDVFGYFNDTEDWDIGEDITVSQPALRSLSNPTKYGQPDNFKNYKNLPNTDAGDYGGVHTNSGIPNKAAYNTITKIGVNKAEQIYYRALTVYLHPSSTFKDAKHALIQSARDLYGRQDAASVEAAWNAVGL

SEQ ID NO: 71851 - protein, 300 aa, Bacillus amyloliquefaciens
AATTGTGTTLKGKTVSLNISSESGKYVLRDLSKPTGTQIITYDLQNREYNLPGTLVSSTTNQFTTSSQRAAVDAHYNHGKVYDYFYQKFNRNSYDNKGGKIVSSVHYGSRYNNAAWIGDQMIYGDGDGSFFSPLSGSMDVTAHEMTHGVTQETANLNYENQPGALNESFSDVFGYFNDTEDWDIGEDITVSQPALRSLSNPTKYGQPDNFKNYKNLPNTDAGDYGGVHTNSGIPNKAAYNTITKIGVNKAEQIYYRALTVYLTPPSTFKDAKAALIQSARDFYGSRDAASVEAAWNAVGL

SEQ ID NO: 71852 - protein, 300 aa, Bacillus amyloliquefaciens
AATTGTGTTLKGKTVSLNISSESGKYVLRDLSKPTGTQIITYDLQQKEYYLPGLLVSSTTNQFTTSSQRAAVDAHYNLGKVYDYFYQKFNRNSYDNKGGKIVSSVHYGSRYNNAAWIGDQMIYGDGDGSFFSPLSGSMDVTAHEMTHGVTQETANLNYENQPGALNESFSDVFGYFNDTEDWDIGEDITVSQPALRSLSNPTKYGQPDNFKNYKNLPNTDAGDYGGVHTNSGIPNKAAYNTITKIGVNKAEQIYYRALTVYLTPSSTFKDAKAALIQSARDLYGSQDAASVEAAWNAVGL

SEQ ID NO: 71853 - protein, 300 aa, Bacillus amyloliquefaciens
AATTGTGTTLKGKTVSLNISSESGKYVLRDLSKPTGTQIITYDLQNREYNLPGTLVSSTTNQFTTSSQRAAVDAHYNLGKVYDYFYQKFNRNSYDNKGGKIVSSVHYGSRYNNAAWIGDQMIYGDGDGSFFSPLSGSMDVTAHEMTHGVTQETANLNYENQPGALNESFSDVFGYFNDTEDWDIGEDITVSQPALRSLSNPTKYGQPDNFKNYKNLPNTDAGDYGGVHTNSGIPNKAAYNTITKIGVNKAEQIYYRALTVYLTPPSTFKDAKAALIQSARDFYGSRDARSVEAAWNAVGL

SEQ ID NO: 71854 - protein, 300 aa, Bacillus amyloliquefaciens
AATTGTGTTLKGKTVSLNISSESGKYVLRDLSKPTGTQIITYDLQNREYNLPGTLVSSTTNQFTTSSQRAAVDAHYNLGKVYDYFYQKFNRNSYDNKGGKIVSSVHYGSRYNNAAWIGDQMIYGDGDGSFFSPLSGSMDVTAHEMTHGVTQETANLYYENQPGALNESFSDVFGYFNDTEDWDIGEDITVSQPALRSLSNPTKYGQPDNFKNYKNLPNTDAGDYGGVHTNSGIPNKAAYNTITKIGVNKAEQIYYRALTVYLWPSSTFKDAKHALIQSARDLYGRQDAASVEAAWNAVGL

SEQ ID NO: 71855 - protein, 300 aa, Bacillus amyloliquefaciens
AATSGTGTTLKGKTVSLNISSENYKYVLRDLSKPTGTQIITYDLQNREYNLPGTLVSSTTNQFTTSSQRAAVDAHYNLGKVYDYFYQKFNRNSYDNKGGKIVSSVHYGSRYNNAAWIGDQMIYGDGDGSFFSPLSGSMDVTAHEMTHGVTQETANLNYENQPGALNESFSDVFGYFNDTEDWDIGEDITVSQPALRSLSNPTKYGQPDNNKNYKNLPNTDAGDYGGVHTNSGIPNKAAYNTITKIGVNKAEQIYYRALTVYLTPSSTFKDAKAALIQSARDLYGSQDAASVEAAWNAVGL

SEQ ID NO: 71856 - protein, 300 aa, Bacillus amyloliquefaciens
AATTGTGTTLKGKTVSLNISSESGKYVLRDLSKPTGTQIITYDLQQKEYYLPGKLVSSTTNQFTTSSQRAAVDAHYNLGKVYDYFYQKFNRNSYDNKGGKIVSSVHYGSRYNNAAWIGDQMIYGDGDGSFFSPLSGSMDVTAHEMTHGVTQETANLNYENQPGALNESFSDVFGYFNDTEDWDIGEDITVSQPALRSLSNPTKYGQPDNFKNYKNLPNTDAGDYGGVHTNSGIPNKAAYNTITKIGVNKAEQIYYRALTVYLTPSSTFKDAKAALIQSARDLYGSQDAASVEAAWNAVGL

SEQ ID NO: 71857 - protein, 300 aa, Bacillus amyloliquefaciens
AATTGTGTTLKGKTVSLNISSESGKYVLRDLSKPTGTQIITYDLQNREYNLPGTLVSSTTNQFTTSSQRAAVDAHYNLGKVYDYFYQKFNRNSYDNKGGKIVSSVHYGSRYNNAAWIGDQMIYGDGDGSFFSPLSGSMDVTAHEMTHGVTQETANLNYENQPGALNESFSDVFGYFNDTEDWDIGEDITVSQPALRSLSNPTKYGQPDNFKNYKNLPNTDAGDYGGVHTNSGIPNKAAYNTITKIGVNKAEQIYYRALTVYLTPPSTFKDAKAALIQSARDMYGSRDARSVEAAWNAVGL

SEQ ID NO: 71858 - protein, 300 aa, Bacillus amyloliquefaciens
AATTGTGTTLKGKTVSLNISSESGKYVLRDLSKPTGTQIITYDLQNREYNLPGTLVSSTTNQFTTSSQRAAVDAHYNLGKVYDYFYQKFNRNSYDNKGGKIVSSVHYGSRYNNAAWIGDQMIYGDGDGSFFSPLSGSMDVTAHEMTHGVTQETANLNYENQPGALNESFSDVFGYFNDTEDWDIGEDITVSQPALRSLSNPTKYGQPDNFKNYKNLPNTDAGDYGGVHTNSGIPNKAAYNTITKIGVNKAEQIYYRALTVYLTPPSTFKDAKAALIQSARDMYGSKDARSVEAAWNAVGL

SEQ ID NO: 71859 - protein, 300 aa, Bacillus amyloliquefaciens
AATTGTGTTLKGKTVSLNISSESGKYVLRDLSKPTGTQIITYDLQQKEYFLPGKLVSSTTNQFTTSSQRAAVDAHYNLGKVYDYFYQKFNRNSYDNKGGKIVSSVHYGSRYNNAAWIGDQMIYGDGDGSFFSPLSGSMDVTAHEMTHGVTQETANLNYENQPGALNESFSDVFGYFNDTEDWDIGEDITVSQPALRSLSNPTKYGQPDNFKNYKNLPNTDAGDYGGVHTNSGIPNKAAYNTITKIGVNKAEQIYYRALTVYLTPSSTFKDAKAALIQSARDLYGSQDAASVEAAWNAVGL

SEQ ID NO: 71860 - protein, 300 aa, Bacillus amyloliquefaciens
AATTGTGTTLKGKTVSLNISSESGKYVLRDLSKPTGTQIITYDLQNREYNLPGTLVSSTTNQFTTSSQRAAVDAHYNLGKVYDYFYQKFNRNSYDNKGGKIVSSVHYGSRYNNAAWIGDQMIYGDGDGSFFSPLSGSMDVTAHEMTHGVTQETANLNYENQPGALNESFSDVFGYFNDTEDWDIGEDITVSQPALRSLSNPTKYGQPDNFKNYKNLPNTDAGDYGGVHTNSGIPNKAAYNTITKIGVNKAEQVYYRALTVYLTPSSTFKDAKAALIQSARDMYGSKDARSVEAAWNAVGL

SEQ ID NO: 71861 - protein, 300 aa, Bacillus amyloliquefaciens
AATTGTGTTLKGKTVSLNISSESGKYVLRDLSKPTGTQIITYDLQQKEYYLPGHLVSSTTNQFTTSSQRAAVDAHYNLGKVYDYFYQKFNRNSYDNKGGKIVSSVHYGSRYNNAAWIGDQMIYGDGDGSFFSPLSGSMDVTAHEMTHGVTQETANLNYENQPGALNESFSDVFGYFNDTEDWDIGEDITVSQPALRSLSNPTKYGQPDNFKNYKNLPNTDAGDYGGVHTNSGIPNKAAYNTITKIGVNKAEQIYYRALTVYLTPSSTFKDAKAALIQSARDLYGSQDAASVEAAWNAVGL

SEQ ID NO: 71862 - protein, 300 aa, Bacillus amyloliquefaciens
AATTGTGTTLKGKTVSLNISSESGKYVLRDLSKPTGTQIITYDLQNREYNLPGTLVSSTTNQFTTSSQRAAVDAHYNLGKVYDYFYQKFNRNSYDNKGGKIVSSVHYGSRYNNAAWIGDQMIYGDGDGSFFTPLSGSMDVTAHEMTHGVTQETANLNYENQPGALNESFSDVFGYFNDTEDWDIGEDITVSQPALRSLSNPTKYGQPDNFKNYKNLPNTDAGDYGGVHTNSGIPNKAAYNTITKIGVNKAEQIYYRALTVYLTPSSTFKDAKAALIQSARDMYGSKDARSVEAAWNAVGL

SEQ ID NO: 71863 - protein, 300 aa, Bacillus amyloliquefaciens
AATTGTGTTLKGKTVSLNISSESGKYVLRDLTKPTGTQIITYDLQNREYNLPGTLVSSTTNQFTTSSQRAAVDAHYNLGKVYDYFYQKFNRNSYDNKGGKIVSSVHYGSRYNNAAWIGDQMIYGDGDGSFFSPLSGSMDVTAHEMTHGVTQETANLNYENQPGALNESFSDVFGYFNDTEDWDIGEDITVSQPALRSLSNPTKYGQPDNFKNYKNLPNTDAGDYGGVHTNSGIPNKAAYNTITKIGVNKAEQIYYRALTVYLHPSSTFKDAKHALIQSARDLYGRQDAASVEAAWNAVGL

SEQ ID NO: 71864 - protein, 300 aa, Bacillus amyloliquefaciens
AATTGTGTTLKGKTVSLNISSESGKYVLRDLSKPTGTQIITYDLQQKEYFLPGHLVSSTTNQFTTSSQRAAVDAHYNLGKVYDYFYQKFNRNSYDNKGGKIVSSVHYGSRYNNAAWIGDQMIYGDGDGSFFSPLSGSMDVTAHEMTHGVTQETANLNYENQPGALNESFSDVFGYFNDTEDWDIGEDITVSQPALRSLSNPTKYGQPDNFKNYKNLPNTDAGDYGGVHTNSGIPNKAAYNTITKIGVNKAEQIYYRALTVYLTPSSTFKDAKAALIQSARDLYGSQDAASVEAAWNAVGL

SEQ ID NO: 71865 - protein, 300 aa, Bacillus amyloliquefaciens
AATTGTGTTLKGKTVSLNISSESGKYVLRDLSKPTGTQIITYDLQNREYNLPGTLVSSTTYQFTTSSQRAAVDAHYNLGKVYDYFYQKFNRNSYDNKGGKIVSSVHYGSRYNNAAWIGDQMIYGDGDGSFFSPLSGSMDVTAHEMTHGVTQETANLNYENQPGALNESFSDVFGYFNDTEDWDIGEDITVSQPALRSLSNPTKYGQPDNFKNYKNLPNTDAGDYGGVHTNSGIPNKAAYNTITKIGVNKAEQIYYRALTVYLTPPSTFKDAKAALIQSARDFYGSKDAASVEAAWNAVGL

SEQ ID NO: 71866 - protein, 300 aa, Bacillus amyloliquefaciens
AATTGTGTTLKGKTVSLNISSESGKYVLRDLSKPTGTQIITYDLQNREYNLPGTLVSSTTNQFTTSSQRAAVDAHYNLGKVYDYFYQKFNRNSYDNKGGKIVSSVHYGSRYNNAAWIGDQMIYGDGDGSFFSPLSGSMDVTAHEMTHGVTQETANLNYENQPGALNESISDVFGYFNDTEDWDIGEDITVSQPALRSLSNPTKYGQPDNFKNYKNLPNTDAGDYGGVHTNSGIPNKAAYNTITKIGVNKAEQIYYRALTVYLTPSSTFKDAKAALIQSARDFYGSRDARSVEAAWNAVGL

SEQ ID NO: 71867 - protein, 300 aa, Bacillus amyloliquefaciens
AATTGTGTTLKGKTVSLNISSESGKYVLRDLSKPTGTQIITYDLQQREYWLPGHLVSSTTNQFTTSSQRAAVDAHYNLGKVYDYFYQKFNRNSYDNKGGKIVSSVHYGSRYNNAAWIGDQMIYGDGDGSFFSPLSGSMDVTAHEMTHGVTQEAANLNYENQPGALNESFSDVFGYFNDTEDWDIGEDITVSQPALRSLSNPTKYGQPDNFKNYKNLPNTDAGDYGGVHTNSGIPNKAAYNTITKIGVNKAEQIYYRALTVYLTPSSTFKDAKAALIQSARDLYGSQDAASVEAAWNAVGL

SEQ ID NO: 71868 - protein, 300 aa, Bacillus amyloliquefaciens
AATTGTGTTLKGKRVSLNISSERGKYVLRDLSKPTGTQIITYDLQKREYNLPGRLVSSTTNQFTTSSQRAAVDAHYNLGKVYDYFYQKFNRNSYDNKGGKIVSSVHYGSRYNNAAWIGDQMIYGDGDGSFFSPLSGSMDVTAHEMTHGVTQETANLNYENQPGALNESFSDVFGYFNDTEDWDIGEDITVSQPALRSLSNPTKYGQPDNFKNYKNLPNTDAGDYGGVHTNSGIPNKAAYNTITKIGVNKAEQIYYRALTVYLTPSSTFKDAKAALIQSARDLYGSQDAASVEAAWNAVGL

SEQ ID NO: 71869 - protein, 300 aa, Bacillus amyloliquefaciens
AATTGTGTTLNGKTVSLNISSESGKYVLRDLSKPTGTQIITYDLQNREYNLPGTLVSSTTNQFTTSSQRAAVDAHYNLGKVYDYFYQKFNRNSYDNKGGKIVSSVHYGSRYNNAAWIGDQMIYGDGDGSFFSPLSGSMDVTAHEMTHGVTQETANLNYENQPGALNESFSDVFGYFNDTEDWDIGEDITVSQPALRSLSNPTKYGQPDNFKNYKNLPNTDAGDYGGVHTNSGIPNKAAYNTITKIGVNKAEQIYYRALTVYLTPSSTFKDAKAALIQSARDMYGSRDARSVEAAWNAVGL

SEQ ID NO: 71870 - protein, 300 aa, Bacillus amyloliquefaciens
AATTGTGTTLKGKTVSLNISSESGKYVLRDLSKPTGTQIITYDLQNREYNLPGTLVSSTTNQFTSSSQRAAVDAHYNLGKVYDYFYQKFNRNSYDNKGGKIVSSVHYGSRYNNAAWIGDQMIYGDGDGSFFSPLSGSMDVTAHEMTHGVTQETANLNYENQPGALNESFSDVFGYFNDTEDWDIGEDITVSQPALRSLSNPTKYGQPDNFKNYKNLPNTDAGDYGGVHTNSGIPNKAAYNTITKIGVNKAEQIYYRALTVYLTPPSTFKDAKAALIQSARDFYGSQDARSVEAAWNAVGL

SEQ ID NO: 71871 - protein, 300 aa, Bacillus amyloliquefaciens
AATTGTGTTLKGKTVSLNISSESGKYVLRDLSKPTGTQIITYDLQQREYYLPGKLVSSTTNQFTTSSQRAAVDAHYNLGKVYDYFYQKFNRNSYDNKGGKIVSSVHYGSRYNNAAWIGDQMIYGDGDGSFFSPLSGSMDVTAHEMTHGVTQETTNLNYENQPGALNESFSDVFGYFNDTEDWDIGEDITVSQPALRSLSNPTKYGQPDNFKNYKNLPNTDAGDYGGVHTNSGIPNKAAYNTITKIGVNKAEQIYYRALTVYLTPSSTFKDAKAALIQSARDLYGSQDAASVEAAWNAVGL

SEQ ID NO: 71872 - protein, 300 aa, Bacillus amyloliquefaciens
AATTGTGTTLKGKTVSLNISSESGKYVLRDLSKPTGTQIITYDLQQKEYWLPGHLVSSTTNQFTTSSQRAAVDAHYNLGKVYDYFYQKFNRNSYDNKGGKIVSSVHYGSRYNNAAWIGDQMIYGDGDGSFFSPLSGSMDVTAHEMTHGVTQETANLNYENQPGALNESFSDVFGYFNDTEDWDIGEDITVSQPALRSLSNPTKYGQPDNFKNYKNLPNTDAGDYGGVHTNSGIPNKAAYNTITKIGVNKAEQIYYRALTVYLTPSSTFKDAKAALIQSARDLYGSQDAASVEAAWNAVGL

SEQ ID NO: 71873 - protein, 300 aa, Bacillus amyloliquefaciens
AATTGTGTTLKGKTVSLNISSESGKYVLRDLSKPTGTQIITYDLQQREYWLPGHLVSSTTNQFTTSSQRAAVDAHYNLGKVYDYFYQKFNRNSYDNKGGKIVSSVHYGSRYNNAAWIGDQMIYGDGDGSFFSPLSGSMDVTTHEMTHGVTQETANLNYENQPGALNESFSDVFGYFNDTEDWDIGEDITVSQPALRSLSNPTKYGQPDNFKNYKNLPNTDAGDYGGVHTNSGIPNKAAYNTITKIGVNKAEQIYYRALTVYLTPSSTFKDAKAALIQSARDLYGSQDAASVEAAWNAVGL

SEQ ID NO: 71874 - protein, 300 aa, Bacillus amyloliquefaciens
AATLGTGTTLKGKTVSLNISSEWYKYVLRDLSKPTGTQIITYDLQNREYNLPGTLVSSTTNQFTTSSQRAAVDAHYNLGKVYDYFYQKFNRNSYDNKGGKIVSSVHYGSRYNNAAWIGDQMIYGDGDGSFFSPLSGSMDVTAHEMTHGVTQETAKLNYENQPGALNESFSDVFGYFNDTEDWDIGEDITVSQPALRSLSNPTKYGQPDNFKNYKNLPNTDAGDYGGVHTNSGIPNKAAYNTITKIGVNKAEQIYYRALTVYLTPSSTFKDAKAALIQSARDLYGSQDAASVEAAWNAVGL

SEQ ID NO: 71875 - protein, 300 aa, Bacillus amyloliquefaciens
AATSGTGTTLKGKTVSLNISSENMKYVLRDLSKPTGTQIITYDLQNREYNLPGTLVSSTTNQFTTSSQRAAVDAHYNLGKVYDYFYQKFNRNSYDNKGGKIVSSVHYGSRYNNAAWIGDQMIYGDGDGSFFSPLSGSMDVTAHEMTHGVTQETANLNYENQPGALNESFSDVFGYFNDTEDWDIGEDITVSQPALRSLSNPTKYGQPDNFKNYKNLPNTDAGDYGGVHTNSGIPNKAAYNTITKIGVNKAEQIYYRALTVYLTPSSTFNDAKAALIQSARDLYGSQDAASVEAAWNAVGL

SEQ ID NO: 71876 - protein, 300 aa, Bacillus amyloliquefaciens
AATTGTGTTLKGKTVSLNISSESGKYVLRDLSKPTGTQIITYDLQNREYNLPGTLVSSTTNQFTTSSQRAAVDAHYNLGKVYDYFYQKFNRNSYDNKGGKIVSSVHYGSRYNNAAWIGDQMIYGDGDGSFFSPLSGSMDVTAHEMTHGVTQETANLNYENQPGALNESFSDVFGYFNDTEDWDIGEDITVSQPALRSLSNPTKYGQPDNFKNYKNLPNTDAGDYGGVHTNSGIPNKAAYNTITKIGVNKAEQIYYRALTVYLTPPSTFKDAKAALIQSARDFYGSPDARSVEAAWNAVGL

SEQ ID NO: 71877 - protein, 300 aa, Bacillus amyloliquefaciens
AATTGTGTTLKGKTVSLNISSESGKYVLRDLSKPTGTQIITYDLQNREYNLPGTLVSSTTNQFTTSSQRAAVDAHYNLGKVYDYFYQKFNRNSYDNKGGKIVSSVHYGSRYNNAAWIGDQMIYGDGDGSFFSPLSGSMDVTAHEMTHGVTQETANLNYENQSGALNESFSDVFGYFNDTEDWDIGEDITVSQPALRSLSNPTKYGQPDNFKNYKNLPNTDAGDYGGVHTNSGIPNKAAYNTITKIGVNKAEQIYYRALTVYLTPSSTFKDAKAALIQSARDMYGSRDARSVEAAWNAVGL

SEQ ID NO: 71878 - protein, 300 aa, Bacillus amyloliquefaciens
AATTGTGTTLKGKTVSLNISSESGKYVLRDLSKPTGTQIITYDLQNREYNLPGTLVSSTTNQFTTSSQRAAVDAHYNLGKVYDYFYQKFNRNSYDNKGGKIVSSVHYGSRYNNAAWIGDQMIYGDGDGSFFSPLSGSMDVTAHEMTHGVTQETANLNYENQPGALNESFSDVFGYFNDTEDWDIGEDITVSQPALRSLSYPTKYGQPDNFKNYKNLPNTDAGDYGGVHTNSGIPNKAAYNTITKIGVNKAEQIYYRALTVYLTPPSTFKDAKAALIQSARDFYGSPDARSVEAAWNAVGL

SEQ ID NO: 71879 - protein, 300 aa, Bacillus amyloliquefaciens
AATTGTGTTLKGKTVSLNISSESGKYVLRDLSKPTGTQIITYDLQNREYNLPGTLVSSTTNQFTTSSQRAAVDAHYNLGKVYDYFYQKFNRNSYDNKGDKIVSSVHYGSRYNNAAWIGDQMIYGDGDGSFFSPLSGSMDVTAHEMTHGVTQETANLNYENQPGALNESFSDVFGYFNDTEDWDIGEDITVSQPALRSLSNPTKYGQPDNFKNYKNLPNTDAGDYGGVHTNSGIPNKAAYNTITKIGVNKAEQIYYRALTVYLTPPSTFKDAKAALIQSARDFYGSKDARSVEAAWNAVGL

SEQ ID NO: 71880 - protein, 300 aa, Bacillus amyloliquefaciens
AATTGTGTTLKGKTVSLNISSESGKYVLRDLSKPTGTQIITYDLQNREYNLPGTLVSSKTNQFTTSSQRAAVDAHYNLGKVYDYFYQKFKRNSYDNKGGKIVSSVHYGSRYNNAAWIGDQMIYGDGDGIFFSPLSGSMDVTAHEMTHGVTQETANLNYENQPGALNESFSDVFGYFNDPEDWDIGEDITLSQPALRSLENPTKYGQPDNFKNYQNLPNTEAGDYGGVHTNSGIPNKAAYNTITKIGVNKAEQIYYRALTVYLTPPSTFKDAKAALIQSARDLYGRQDAASVEAAWNAVGL

SEQ ID NO: 71881 - protein, 300 aa, Bacillus amyloliquefaciens
AATTGTGTTLKGKTVSLNISSESGKYVLRDLSKPTGTQIITYDLKNREYNLPGTLVSSKTNQFTTSSQRAAVDAHYNLGKVYDYFYQKFKRNSYDNKGGKIVSSVHYGSRYNNAAWIGDQMIYGDGDGIFFSPLSGSLDVTAHEMTHGVTQETANLNYENQPGALNESFSDVFGYFNDPEDWDIGEDITLSQPALRSLENPTKYGQPDNFKNYQNLPNTEAGDYGGVHTNSGIPNKAAYNTITKIGVNKAEQIYYRALTVYLTPPSTFKDAKAALIQSARDLYGRQDAASVEAAWNAVGL

SEQ ID NO: 71882 - protein, 300 aa, Bacillus amyloliquefaciens
AATTGTGTTLKGKTVSLNISSESGKYVLRDLSKPTGTQIITYDLQNREYNLPGTLVSSTTNQFTTSSQRAAVDAHYNLGKVYDYFYQKFNRNSYDNKGGKIVSSVHYGSRYNNAAWIGDQMIYGDGDGSFFSPLSGSMDVTAHEMTHGVTQETANLNYENQPGALNESFSDVFGYFNDTEDWDIGEDITVSQPALRSLSNPSNYGQPDNFKNYKNLPNTDAGDYGGVHTNSGIPNKAAYNTITKIGVNKAEQIYYRALTVYLTPPSTFKDAKAALIQSARDMYGSRDARSVEAAWNAVGL

SEQ ID NO: 71883 - protein, 300 aa, Bacillus amyloliquefaciens
AATTGTGTTLKGKTVSLNISSESGKYVLRDLSKPTGTQIITYDLQNREYNLPGTLVSSKTNQFTTSSQRAAVDAHYNLGKVYDYFYQKFKRNSYDNKGGKIVSSVHYGSRYNNAAWIGDQMIYGDGDGIFFSPLSGSMDVTAHEMTHGVTQETANLNYENQPGALNESFSDVFGYFNDPEDWDIGEDITLSQPALRSLENPTKYGQPDNFKNYQNLPNTEAGDYGGVHINSGIPNKAAYNTITKIGVNKAEQIYYRALTVYLTPPSTFKDAKAALIQSARDLYGRQDAASVEAAWNAVGL

SEQ ID NO: 71884 - protein, 300 aa, Bacillus amyloliquefaciens
AATTGTGTTLKGKTVSLNISSESGKYVLRDLSKPTGTQIITYDLKNREYNLPGTLVSSKTNQFTTSSQRAAVDAHYNLGKVYDYFYQKFKRNSYDNKGGKIVSSVHYGSRYNNAAWIGDQMIYGDGDGIFFSPLSGSLDVTAHEMTHGVTQETANLNYENQPGALNESFSDVFGYFNDPEDWDIGEDITLSQPALRSLENPTKYGQPDNFKNYQNLPNTEAGDYGGVHINSGIPNKAAYNTITKIGVNKAEQIYYRALTVYLTPPSTFKDAKAALIQSARDLYGRQDAASVEAAWNAVGL

SEQ ID NO: 71885 - protein, 300 aa, Bacillus amyloliquefaciens
AATTGTGTTLKGKTVSLNISSESGKYVLRDLSKPTGTQIITYDLKNREYRLPGTLVSSKTNQFTTSSQRAAVDAHYNLGKVYDYFYQKFKRNSYDNKGGKIVSSVHYGSRYNNAAWIGDQMIYGDGDGIFFSPLSGSLDVTAHEMTHGVTQETANLNYENQPGALNESFSDVFGYFNDPEDWDIGEDITLSQPALRSLENPTKYGQPDNFKNYQNLPNTEAGDYGGVHTNSGIPNKAAYNTITSIGVNKAEQIYYRALTVYLTPPSTFKDAKAALIQSARDLYGRQDAASVEAAWNAVGL

SEQ ID NO: 71886 - protein, 300 aa, Bacillus amyloliquefaciens
AATTGTGTTLKGKTVSLNISSESGKYVLRDLSKPTGTQIITYDLKNREYRLPGTLVSSKTNQFTTSSQRAAVDAHYNLGKVYDYFYQKFKRNSYDNKGGKIVSSVHYGSRYNNAAWIGDQMIYGDGDGIFFSPLSGSLDVTAHEMTHGVTQETANLNYENQPGALNESFSDVFGYFNDPEDWDIGEDITLSQPALRSLENPTKYGQPDNFKNYQNLPNTEAGDYGGVHINSGIPNKAAYNTITSIGVNKAEQIYYRALTVYLTPPSTFKDAKAALIQSARDLYGRQDAASVEAAWNAVGL

SEQ ID NO: 71887 - protein, 229 aa, Bacillus amyloliquefaciens
AATTGTGTTLKGKTVSLNISSESGKYVLRDLSKPTGTQIITTDLQNREYNLPGTLVSSTTNQFTTSSQRAAVDAHYNLGKVYDYFYQKFNRNSYDNKGGKIVSSVHYGSRYNNAAWIGDQMIYGDGDGSFFSPLSGSMDVTAHEMTHGVTQETANLNYENQPGALNESFSDVFGYFNDTEDWDIGEDITVSQPALRSLSNPTKYGQPDNFKNYKNLPNTDAAATTGTGT

SEQ ID NO: 71888 - protein, 300 aa, Bacillus subtilis
AAATGTGTTLKGKTVSLNISSESGKYVMRDLSKPTGTQIITYDLQNRQYNLPGTLVSSTTNQFTTSSQRAAVDAHYNLGKVYDYFYQTFKRNSYDNKGGKIVSSVHYGSKYNNAAWIGDQMIYGDGDGSFFSPLSGSMDVTAHEMTHGVTQETANLNYENQPGALNESFSDVFGYFNDTEDWDIGEDITVSQPALRSLSNPTKYGQPDHYKNYRNLPNTDAGDYGGVHTNSGIPNKAAYNTITKIGVKKAEQIYYRALTVYLTPSSSFKDAKAALIQSARDLYGSQDAASVEAAWNAVGL

SEQ ID NO: 71889 - protein, 300 aa, Bacillus amyloliquefaciens
AATKGTGTTLKGKTVSLNISSESGKYVLRDLSKPTGTQIITYDLKNREYRLPGKLVSSKTNQFTTSSQRAAVDAHYNLGKVYDYFYQKFKRNSYDNKGGKIVSSVHYGSRYNNAAWIGDQMIYGDGDGIFFSPLSGSLDVTAHEMTHGVTQETANLNYENQPGALNESFSDVFGYFNDPEDWDIGEDITLSQPALRSLENPTKYGQPDNFKNYQNLPNTEAGDYGGVHTNSGIPNKAAYNTITSIGVNKAEQIYYRALTVYLTPPSTFHDAKAALIQSARDLYGRQDAASVEAAWEAVGL

SEQ ID NO: 71890 - protein, 300 aa, Bacillus amyloliquefaciens
AATKGTGTTLKGKTVSLNISSESGKYVLRDLSKPTGTQIITYDLKNREYRLPGKLVSSKTNQFTTSSQRAAVDAHYNLGKVYDYFYQKFKRNSYDNKGGKIVSSVHYGSRYNNAAWIGDQMIYGDGDGIFFSPLSGSLDVTAHEMTHGVTQETANLNYENQPGALNESFSDVFGYFNDPEDWDIGEDITLSQPALRSLENPTKYGQPDNFKNYQNLPNTEAGDYGGVHINSGIPNKAAYNTITSIGVNKAEQIYYRALTVYLTPPSTFHDAKAALIQSARDLYGRQDAASVEAAWEAVGL

SEQ ID NO: 71891 - protein, 300 aa, Bacillus subtilis
AAATGTGTTLKGKTVSLNISSENGKYVMRDLSKPTGTQIITYDLQNRQYNLPGTLVSSTTNQFTTSSQRAAVDAHYNLGKVYDYFYQTFKRNSYDNRGGKIVSSVHYGSRYNNAAWXGDQMIYGDGDGSFFSPLSGSMDVTAHEMTHGVTQETANLNYENQPGALNESFSDVFGYFTDTEDWDIGEDITVSQPALRSLSNPTKYGQPDHYKNYQNLPNTDAGDYGGVHTNSGIPNKAAYNTITKIGVKKAEQIYYRALTVYLTPSSSFKDAKAALIQSARDLYGSQDAASVEAAWNAVGL

SEQ ID NO: 71892 - protein, 300 aa, Bacillus subtilis
AAATGTGTTLKGKTVSLNISSENGKYVMRDLSKPTGTQIITYDLQNRQYNLPGTLVSSTTNQFTTSSQRAAVDAHYNLGKVYDYFYQTFKRNSYDNRGGKIVSSVHYGSRYNNAAWIGDQMIYGDGDGSFFSPLSGSMDVTAHEMTHGVTQETANLNYENQPGALNESFSDVFGYFTDTEDWDIGEGITVSQPALRSLSNPTKYGQPDHYKNYQNLPNTDAGDYGGVHTNSGIPNKAAYNTITKIGVKKAEQIYYRALTVYLTPSSSFKDAKAALIQSARDLYGSQDAASVEAAWNAVGL

SEQ ID NO: 71893 - protein, 281 aa, Bacillus subtilis
AAATGTGTTLKGKTVSLNISSENGKYVMRDLSKPTGTQIITYDLQNRQYNLPGTLVSSTTNQFTTSSQRAAVDAHYNLGKVYDYFYQTFKRNSYDNRGGKIVSSVHYGSRYNNAAWIGDQMIYGDGDGSFFSPLSGSMDVTAHEMTHGVTQETANLNYENQPGALNESFSDVFGYFTDTEDWDIGEDITVSQPALRSLSNPTKYGQPDHYKNYQNLPNTDAGDYGGVHTNSGIPNKAAYNTITKIGVKKAEQIYYRALTVYLTPSSSFKDAKAALIQSARD

SEQ ID NO: 71894 - protein, 300 aa, Bacillus subtilis
AAATGTGTTHKGKTVPLNISSESGKYVMRDLSKPTGTQIITYDLQNRQYNLPGTLVSSTTNQFTTSSQRAAVDAHYNLGKVYDYFYQTLKRNSYDNKGGKIVSSVHYGGKYNNAAWIGDQMIYGDGDGSFFSPLSGSMDVTAHEMTHGVTQETANLNYENQPGALNESFSDVFGYFNDTEDWDIGEDITVSQPALRSLSSPTKYGQPDHYKNYRNLPNTDAGDYGGVHTNSGIPNKAAYNTITKIGVKKAEQIYYRALTVYLTPSSSFKDAKAALIQSARDLYGSQDAASVEAAWNAVGL

SEQ ID NO: 71895 - protein, 230 aa, Bacillus subtilis
AVDAHYNLGKVYDYFYSNFKRNSYDNKGSKIVSSVHYGTQYNNAAWTGDQMIYGDGDGSFFSPLSGSLDVTAHEMTHGVTQETANLIYENQPGALNESFSDVFGYFNDTEDWDIGEDITVSQPALRSLSNPTKYNQPDNYANYRNLPNTDEGDYGGVHTNSGIPNKAAYNTITKLGVSKSQQIYYRALTTYLTPSSTFKDAKAALIQSARDLYGSTDAAKVEAAWNAVGL

SEQ ID NO: 71896 - protein, 300 aa, Bacillus subtilis
AAATGSGTTLKGATVPLNISYESGKYVLRDLSKPTGTQIITYDLQNRQSRLPGTLVSSTTNTFTSSSQRAAVDAHYNLGKVYDYFYSTFKRNSYDNKGSKIVSSVHYGTRYNNAAWTGDQMIYGDGDGSFFSPLSGSLDVTAHEMTHGVTQETANLIYENQPGALNESFSDVFGYFNDTEDWDIGEDITVSQPALRSLSNPTKYGQPDNYANYRNLPNTDEGDYGGVHTNSGIPNKAAYNTITKLGVSKSQQIYYRALTTYLTPSSTFKDAKAALIQSARDLYGSTDAAKVEAAWNAVGL

SEQ ID NO: 71897 - protein, 300 aa, Bacillus subtilis
AAATGSGTTLKGATVPLNISYESGKYVLRDLSKPTGTQIITYDLQNRQSRLPGTLVSSTTNTFTSSSQRAAVDAHYNLGKVYDYFYSTFKRNSYDNKGSKIVSSVHYGTRYNNAAWTGDQMIYGDGDGSFFSPLSGSLDVTAHEMTHGVTQETANLIYENQPGALNESFSDVFGYFNDTEDWDIGEDITVSQPALRSLSNPTKYDQPDNYANYRNLPNTDEGDYGGVHINSGIPNKAAYNTITKLGVSKSQQIYYRALTTYLTPSSTFKDAKAALIQSARDLYGSTDAAKVEAAWNAVGL

SEQ ID NO: 71898 - protein, 300 aa, Bacillus subtilis
AAATGSGTTLKGATVPLNISYEGGKYVLRDLSKPTGTQIITYDLQNRQSRLPGTLVSSTTKTFTSSSQRAAVDAHYNLGKVYDYFYSNFKRNSYDNKGSKIVSSVHYGTQYNNAAWTGDQMIYGDGDGSFFSPLSGSLDVTAHEMTHGVTQETANLIYENQPGALNESFSDVFGYFNDTEDWDIGEDITVSQPALRSLSNPTKYNQPDNYANYRNLPNTDEGDYGGVHTNSGIPNKAAYNTITKLGVSKSQQIYYRALTTYLTPSSTFKDAKAALIQSARDLYGSTDAAKVEAAWNAVGL

SEQ ID NO: 71899 - protein, 300 aa, Bacillus subtilis
AAATGSGTTLKGATVPLNISYEGGKYVLRDLSKPTGTQIITYDLQNRQSRLPGTLVSSTTKTFTSSSQRAAVDAHYNLGKVYDYFYSNFKRNSYDNKGSKIVSSVHYGTQYNNAAWTGDQMIYGDGDGSFFSPLSGSLDVTAHEMTHGVTQETANLIYENQPGALNESFSDVFGYFNDTEDWDIAEDITVSQPALRSLSNPTKYNQPDNYANYRNLPNTDEGDYGGVHTNSGIPNKAAYNTITKLGVSKSQQIYYRALTTYLTPSSTFKDAKAALIQSARDLYGSTDAAKVEAAWNAVGL

SEQ ID NO: 71900 - protein, 300 aa, Bacillus subtilis
AAATGSGTTLKGATVPLNISYEGGKYVLRDLSKPTGTQIITYDLQNRQSRLPGTLVSSTTKTFTSSSQRAAVDAHYNLGKVYDYFYSNFKRNSYDNKGSKIVSSVHYGTQYNNAAWTGDQMIYGDGDGSFFSPLSGSLDVTAHEMTHAVTQETANLIYENQPGALNESFSDVFGYFNDTEDWDIGEDITVSQPALRSLSNPTKYNQPDNYANYRNLPNTDEGDYGGVHTNSGIPNKAAYNTITKLGVSKSQQIYYRALTTYLTPSSTFKDAKAALIQSARDLYGSTDAAKVEAAWNAVGL

SEQ ID NO: 71901 - protein, 300 aa, Bacillus subtilis
AAATGSGTTLKGATVPLNISYEGGKYVLRDLSKPTGTQIITYDLQNRQSRLPGTLVSSTTKTFTSSSQRAAVDAHYNLGKVYDYFYSNFKRNSYDNRGSKIVSSVHYGTQYNNAAWTGDQMIYGDGDGSFFSPLSGSLDVTAHEMTHGVTQETANLIYENQPGALNESFSDVFGYFNDTEDWDIGEDITVSQPALRSLSNPTKYNQPDNYANYRNLPNTDEGDYGGVHTNSGIPNKAAYNTITKLGVSKSQQIYYRALTTYLTPSSTFKDAKAALIQSARDLYGSTDAAKVEAAWNAVGL

SEQ ID NO: 71902 - protein, 300 aa, Bacillus subtilis
AAATGSGTTLKGATVPLNISYEGGKYVLRDLSKPTGTQIITYDLQNRQSRLPGTLVSSTTKTFTSSSQRAAVDAHYNLGKVYDYFYSNFKRNSYDNKGSKIVSSVHYGTQYNNAAWTGDQMIYGDGDGSFFSPLSGSLDVTAHEMTHAVTQETANLIYENQPGALNESFSDVFGYFNDTEDWDIAEDITVSQPALRSLSNPTKYNQPDNYANYRNLPNTDEGDYGGVHTNSGIPNKAAYNTITKLGVSKSQQIYYRALTTYLTPSSTFKDAKAALIQSARDLYGSTDAAKVEAAWNAVGL

SEQ ID NO: 71903 - protein, 300 aa, Bacillus subtilis
AAATGSGTTLKGATVPLNISYEGGKYVLRDLSKPTGTQIITYDLQNRQSRLPGTLVSSTTKTFTSSSQRAAVDAHYNLGKVYDYFYSNFKRHSNDNRGSNMVSSVHYGTQYNNAAWTGDQMIYGDGDGSFFSPLSGSLDVTAHEMTHGVTQETANLIYENQPGALNESFSDVFGYFNDTEDWDIGEDITVSQPALRSLSNPTKYNQPDNYANYRNLPNTDEGDYGGVHTNSGIPNKAAYNTITKLGVSKSQQIYYRALTTYLTPSSTFKDAKAALIQSARDLYGSTDAAKVEAAWNAVGL

SEQ ID NO: 71904 - protein, 329 aa, Aspergillus oryzae
TLPNVTIFATGGTIAGSSADNTATTGYKAGAVGIQTLIDAVPEMLNVANVAGVQVTNVGSPDITSDILLRLSKQINEVVCNDPTMAGAVVTHGTDTLEESAFFLDATVNCRKPVVIVGAMRPSTAISADGPLNLLQSVTVAASPKARDRGALIVMNDRIVSAFYASKTNANTVDTFKAIEMGNLGEVVSNKPYFFYPPVKPTGKTEVDIRNITSIPRVDILYSYEDMHNDTLYSAIDNGAKGIVIAGSGSGSVSTPFSAAMEDITTKHNIPIVASTRTGNGEVPSSAESSQIASGYLNPAKSRVLLGLLLAQGKSIEEMRAVFERIGVA

SEQ ID NO: 71905 - protein, 378 aa, Aspergillus oryzae; identical to SEQ ID NO: 89

SEQ ID NO: 71906 - protein, 359 aa, Aspergillus oryzae
SPLLYPRATDSNVTYVFTNPNGLNFTQMNTTLPNVTIFATGGTIAGSSADNTATTGYKAGAVGIQTLIDAVPEMLNVANVAGVQVTNVGSPDITSDILLRLSKQINEVVCNDPTMAGAVVTHGTDTLEESAFFLDATVNCRKPVVIVGAMRPSTAISADGPLNLLQSVTVAASPKARDRGALIVMNDRIVSAFYASKTNANTVDTFKAIEMGNLGEVVSNKPYFFYPPVKPTGKTEVDIRNITSIPRVDILYSYEDMHNDTLYSAIDNGAKGIVIAGSGSGSVSTPFSAAMEDITTKHNIPIVASTRTGNGEVPSSAESSQIASGYLNPAKSRVLLGLLLAQGKSIEEMRAVFERIGVA

SEQ ID NO: 71907 - protein, 361 aa, Aspergillus niger; identical to SEQ ID NO: 90

SEQ ID NO: 71908 - protein, 378 aa, Aspergillus oryzae
MGVNFKVLALSALATISHASPLLYPRATDSNVTYVFTNPNGLNFTQMNTTLPNVTIFATGGTIAGSSADNTATTGYKAGAVGIQTLIDAVPEMLNVANVAGVQVTNVGSPDITSDILLRLSKQINEVVCNDPTMAGAVVTHGTDTLEESAFFLDATVNCRKPVVIVGAMRPSTAISADGPLNLLQSVTVAASPKARDRGALIVMDDRIVSAFYASKTNANTVDTFKAIEMGNLGEVVSNKPYFFYPPVKPTGKTEVDIRNITSIPRVDILYSYEDMHNDTLYSAIDNGAKGIVIAGSGSGSVSTPFSAAMEDITTKHNIPIVASTRTGNGEVPSSAESSQIASGYLNPAKSRVLLGLLLAQGKSIEEMRAVFERIGVA

SEQ ID NO: 71909 - protein, 361 aa, Aspergillus niger
SPLLYSRTTNETFVFTNANGLNFTQMNTTLPNVTIFATGGTIAGSDSSSTATTGYTSGAVGVLSLIDAVPSMLDVANVAGVQVANVGSEDITSDILISMSKKLNRVVCEDPTMAGAVITHGTNTLEETAFFLDATVNCGKPIVIVGAMRPSTAISADGPFNLLEAVTVAASTSARDRGAMVVMNDRIASAYYVTKTNANTMDTFKAMEMGYLGEMISNTPFFFYPPVKPTGKVAFDITNVTEIPRVDILFSYEDMHNDTLYNAISSGAQGIVIAGAGAGGVTTSFNEAIEDVINRLEIPVVQSMRTVNGEVPLSDVSSDTATHIASGYLNPQKSRILLGLLLSQGKNITEIADVFALGTDA

SEQ ID NO: 71910 - protein, 361 aa, Aspergillus niger
SPLLYSRTTNETFVFTNANGLNFTQMNTTLPNVTIFATGGTIAGSDSSSTATTGYTSGAVGVLSLIDAVPYMLDVANVAGVQVANVGSEDITSDILISMSKKLNRVVCEDPTMAGAVITHGTDTLEETAFFLDATVNCGKPIVIVGAMRPSTAISADGPFNLLEAVTVAASTSARDRGAMVVMNDRIASAYYVTKTNANTMDTFKAMEMGYLGEMISNTPFFFYPPVKPTGKVAFDITNVTEIPRVDILFSYEDMHNDTLYNAISSGAQGIVIAGAGAGGVTTSFNEAIEDVINRLEIPVVQSMRTVNGEVPLSDVSSDTATHIASGYLNPQKSRILLGLLLSQGKNITEIADVFALGTDA

SEQ ID NO: 71911 - protein, 378 aa, Aspergillus oryzae
MGVNFKVLALSALATISHASPLLYPRATDSNVTYVFTNPNGLNFTQMNTTLPNVTIFATGGTIAGSSADKTATTGYKAGAVGIQTLIDAVPEMLNVANVAGVQVTNVGSPDITSDILLRLSKQINEVVCNDPTMAGAVVTHGTDTLEESAFFLDATVNCRKPVVIVGAMRPSTAISADGPLNLLQSVTVAASPKARDRGALIVMDDRIVSAFYASKTNANTVDTFKAIEMGNLGEVVSNKPYFFYPPVKPTGKTEVDIRNITSIPRVDILYSYEDMHNDTLYSAIDNGAKGIVIAGSGSGSVSTPFSAAMEDITTKHNIPIVASTRTGNGEVPSSAESSQIASGYLNPAKSRVLLGLLLAQGKSIEEMRAVFERIGVA

SEQ ID NO: 71912 - protein, 361 aa, Aspergillus niger
SPLLYSRTTNETFVFTNANGLNFTQMNTTLPNVTIFATGGTIAGSDSSSTATTGYTSGAVGVLSLIDAVPSMLDVANVAGVQVANVGSEDITSDILISMSKKLNRVVCEDPTMAGAVITHGTDTLEETAFFLDATVNCGKPIVIVGAMRPSTAISADGPFNLLEAVTVAASTSARDRDAMVVMNDRIASAYYVTKTNANTMDTFKAMEMGYLGEMISNTPFFFYPPVKPTGKVAFDITNVTEIPRVDILFSYEDMHNDTLYNAISSGAQGIVIAGVGAGGVTTSFNEAIEDVINRLEIPVVQSMRTVNGEVPLSDVSSDTATHIASGYLNPQKSRILLGLLLSQGKNITEIADVFALGTDA

SEQ ID NO: 71913 - protein, 361 aa, Aspergillus niger
SPLLYSRTTNETFVFTNANGLNFTQMNTTLPNVTIFATGGTIAGSGSSSTATTGYTSGAVGVLSLIDAVPSMLDVANVAGVQVANVGSEDITSDILISMSKKLNRVVCEDPTMASAVITHGTDTLEETAFFLDATVNCGKPIVIVGAMRPSTAISADGPFNLLEAVTVAASTSARDRGAMVVMNDRIASAYYVTKTNANTMDTFKAMEMGYLGEMISNTPFFFYPPVKPTGKVAFDITNVTEIPRVDILFSYEDMHNDTLYNAISSGAQGIVIAGAGAGGVTTSFNEAIEDVINRLEIPVVQSMRTVNGEVPLSDVSSDTATHIASGYLNPQKSRILLGLLLSQGKNITEIADVFALGTDA

SEQ ID NO: 71914 - protein, 361 aa, Aspergillus niger
SPLLYSRTTNETFVFTNANGLNFTQMNTTLPNVTIFATGGTIAGSDSSSTATTGYTSGTVGVLSLIDAVPSMLDVANVAGVQVVNVGSEDITSDILISMSKKLNRVVCEDPTMAGAVITHGTDTLEETAFFLDATVNCGKPIVIVGAMRPSTAISADGPFNLLEAVTVAASTSARDRGAMVVMNDRIASAYYVTKTNANTMDTFKAMEMGYLGEMISNTPFFFYPPVKPTGKVAFDITNVTEIPRVDILFSYEDMHNDTLYNAISSGAQGIVIAGAGAGGVTTSFNEAIEDVINRLEIPVVQSMRTVNGEVPLSDVSSDTATHIASGYLNPQKSRILLGLLLSQGKNITEIADVFALGTDA

SEQ ID NO: 71915 - protein, 361 aa, Aspergillus niger
SPLLYSRTTNETFVFTNANGLNFTQMNTTLPNVTIYATGGTIAGSDSSSTATTGYTSGAVGVLSLIDAVPSMLDVANVAGVQVANVGSEDITSDILISMSKNLNRVVCEDPTMAGAVITHGTDTLEETAFFLDATVNCGKPIVIVGAMRPSTAISADGPFNLLEAVTVAASTSARDRGAMVVMNDRIASAYYVTKTNANTMDTFKAMEMGYLGEMISNTPFFFYPPVKPTGKVAFDITNVTEIPRVDILFSYEDMHNDTLYNAISSGAQGIVIAGAGAGGVTTSFNEAIEDVINRLEIPVVQSMRTVNGEVPLSDVSSDTATHIASGYLNPQKSRILLGLLLSQGKNITEIADVFALGTDA

SEQ ID NO: 71916 - protein, 361 aa, Aspergillus niger
SPLLYSRTTNETFVFTNANGLNFTQMNTTLPNVTIFATGGTIAGSVSSSTATTGYTSGAVGVLSLIDAVPSMLDVANVAGVQVANVGSEDITSDILISMSKKLNRVVCEDPTMAGAVITHGTDTLEETAFFLDATVNCGKPIVIVGAMRPSTAISADGPFNLLEAVTVAASTSARDRGAMVVMNDRIASAYYVTKTNANTMDTFKAMEMGYLGEMISNTPFFFYPPVKPTGKVAFDITNVTEIPRVDILFSYEDMHNDTLYNAISSGAQGIVIAGAGAGGVTISFNEAIEDVINRLEIPVVQSMRTVNGEVPLSDVSSDTATHIASGYLNPQKSRILLGLLLSQGKNITEIADVFALGTDA

SEQ ID NO: 71917 - protein, 361 aa, Aspergillus niger
SPLLYSRTTNETFVFTNANGLNFTQMNTTLPNVTIFATGGTIAGSDPSSTATTGYTSGAVGVLSLIDAVPSMLDVANVAGVQVANVGSEDITSDILISMSKKLNRVVCEDPTMAGAVITHGTDTLEETAFFLDATVNCGKPIVIVGAMRPSTAISADGPFNLLEAVTVAASTSARDRGAMVVMNDRIASAYYVTKTNANTMDTFKAMEMGYLGEMISNTPFFFYPPVKPTGKVAFDITNVTEIPRVDILFSYEDMHNDTLYNAISSGAQGIVIAGAGAGGVTTSFNEAIEDVVNRLEIPVVQSMRTVNGEVPLSDVSSDTATHIASGYLNPQKSRILLGLLLSQGKNITEIADVFALGTDA

SEQ ID NO: 71918 - protein, 378 aa, Aspergillus oryzae
MGVNFKVLALSALATISHASPLLYPRATDSNVTYVFTNPNGLNFTQMNTTLPNVTIFATGGTIAGSSADKTATTGYKAGAVGIQTLIDAVPEMLNVANVAGVQVTNVGSPDITSDILLRLSKQINEVVCNDPTMAGAVVTHGTDTLEESAFFLDATVNCRKPVVIVGAMRPSTAISADGPLNLLQSVTVAASPKARDRGALIVMDDRIVSAFYASKTNANTVDTFKAIEMGNLGEVVSNKPYFFYPPVKPTGKTEVDIRNITSIPRVDILYSYEDMHNDTLYSAIDNGAKGIVIAGSGSGSVSTPFSAAMEDITTKHNIPIVASTRTGNGEVPSSAESSQIASGYLNPAKSRVLLMLLLAQGKSIEEMRAVFERIGVA

SEQ ID NO: 71919 - protein, 378 aa, Aspergillus oryzae
MGVNFKVLALSALATISHASPLLYPRATDSNVTYVFTNPNGLNFTQMNTTLPNVTIFATGGTIAGSSADKTATTGYKAGAVGIQTLIDAVPEMLNVANVAGVQVTNVGSPDITSDILLRLSKQINEVVCNDPTMAGAVVTHGTDTLEESAFFLDATVNCRKPVVLVGAMRPSTAISADGPLNLLQSVTVAASPKARDRGALIVMDDRIVSAFYASKTNANTVDTFKAIEMGNLGEVVSNKPYFFYPPVKPTGKTEVDIRNITSIPRVDILYSYEDMHNDTLYSAIDNGAKGIVIAGSGSGSVSTPFSAAMEDITTKHNIPIVASTRTGNGEVPSSAESSQIASGYLNPAKSRVLLGLLLAQGKSIEEMRAVFERIGVA

SEQ ID NO: 71920 - protein, 378 aa, Aspergillus oryzae
MGVNFKVLALSALATISHASPLLYPRATDSNVTYVFTNPNGLNFTQMNTTLPNVTIFATGGTIAGSSADKTATTGYKAGAVGIQTLIDAVPEMLNVANVAGVQVTNVGSPDITSDILLRLSKQINEVVCNDPTMAGAVVTHGTDTLEESAFFLDATVNCRKPVVIVGAMRPSTAISADGPLNLLQSVTVAASPKARDRGALIVMDDRIVSAFYASKTNANTVDTFKAIEMGNLGEVVSNKPYFFYPPVKPTGKTEVDIRNITSIPRVDILYSYEDMHNDTLYSAIDNGAKGIVIAGSGNGSVSTPFSAAMEDITTKHNIPIVASTRTGNGEVPSSAESSQIASGYLNPAKSRVLLGLLLAQGKSIEEMRAVFERIGVA

SEQ ID NO: 71921 - protein, 378 aa, Aspergillus oryzae
MGVNFKVLALSALATISHASPLLYPRATDSNVTYVFTNPNGLNFTQMNTTLPNITIFATGGTIAGSSADKTATTGYKAGAVGIQTLIDAVPEMLNVANVAGVQVTNVGSPDITSDILLRLSKQINEVVCNDPTMAGAVVTHGTDTLEESAFFLDATVNCRKPVVIVGAMRPSTAISADGPLNLLQSVTVAASPKARDRGALIVMDDRIVSAFYASKTNANTVDTFKAIEMGNLGEVVSNKPYFFYPPVKPTGKTEVDIRNITSIPRVDILYSYEDMHNDTLYSAIDNGAKGIVIAGSGSGSVSTPFSAAMEDITTKHNIPIVASTRTGNGEVPSSAESSQIASGYLNPAKSRVLLGLLLAQGKSIEEMRAVFERIGVA

SEQ ID NO: 71922 - protein, 378 aa, Aspergillus oryzae
MGVNFKVLALSALATISHASPLLYPRATDSNVTYVFTNPNGLNFTQMNTTLPNVTIFATGGTIAGSSADKTATTGYKAGAVGIQTLIDAVPEMLNVANVAGVQVTNVGSPDITSDILLRLSKQINEVVCNDPTMAGAVVTHGTDTLEESAFFLDATVNCRKPVVIVGAMRPSTAISADGPLNLLQSVTVAASPKARDRGALIVMDDRIVSAFYASKTNANTVDAFKAIEMGNLGEVVSNKPYFFYPPVKPTGKTEVDIRNITSIPRVDILYSYEDMHNDTLYSAIDNGAKGIVIAGSGSGSVSTPFSAAMEDITTKHNIPIVASTRTGNGEVPSSAESSQIASGYLNPAKSRVLLGLLLAQGKSIEEMRAVFERIGVA

SEQ ID NO: 71923 - protein, 361 aa, Aspergillus niger
SPLLYSRTTNETFVFTNANGLNFTQMNTTLPNVTIFATGGTIAGSGSSSTATTGYTSGTVGVLSLIDAVPSMLDVANVAGVQVANVGSEDITSDILISMSKNLNRVVCEDPTMAGAVITHGTDTLEETAFFLDATVNCGKPIVIVGAMRPSTAISADGPFNLLEAVTVAASTSARDRGAMVVMNDRIASAYYVTKTNANTMDTFKAMEMGYLGEMISNTPFFFYPPVKPTGKVAFDITNVTEIPRVDILFSYEDMHNDTLYNAISSGAQGIVIAGAGAGGVTTSFNEAIEDVINRLEIPVVQSMRTVNGEVPLSDVSSDTATHIASGYLNPQKSRILLGLLLSQGKNITEIADVFALGTDA

SEQ ID NO: 71924 - protein, 361 aa, Aspergillus niger
SPLLYSRTTNETFVFTNANGLNFTQMNTTLPNVTIFATGGTIAGSGSSSTATTGYTSGAVGVLSLIDAVPSMLDVANVAGVQVANVGSEDITSGILISMSKKLNHVVCEDPTMAGAVITHGTDTLEETAFFLDATVNCGKPIVIVGAMRPSTAISADGPFNLLEAVTVAASTSARDRGAMVVMNDRIASAYYVTKTNANTMDTFKAMEMGYLGEMISNTPFFFYPPVKPTGKVAFDITNVTEIPRVDILFSYEDMHNDTLYNAISSGAQGIVIAGAGAGGVTTSFNEAIEDVINRLEIPVVQSMRTVNGEVPLSDVSSDTATHIASGYLNPQKSRILLGLLLSQGKNITEIADVFALGTDA

SEQ ID NO: 71925 - protein, 361 aa, Aspergillus niger
SPLLYSRTTNETFVFTNANGLNFTQMNTTLPNVTIFATGGTIAGSDSSSTATTGYTSGAIGVLSLIDAVPSMLDVANVAGVQVANVGSEDITSDILISMSKKLNRAVCEDPTMAGAVITHGTDTLEETAFFLDATVNCGKPIVIVGAMRPSTAISADGPFNLLEAVTVAASTSARDRGAMVVMNDRIASAYYVTKTNANTMDTFKAMEMGYLGEMISNTPFFFYPPVKPTGKVAFDITNVTEIPRVDILFSYEDMHNDTLYNAISSGAQGIVIAGAGAGGVTTSFNEAIEDVINRLDIPVVQSMRTVNGEVPLSDVSSDTATHIASGYLNPQKSRILLGLLLSQGKNITEIADVFALGTDA

SEQ ID NO: 71926 - protein, 361 aa, Aspergillus niger
SPLLYSRTTNETFVFTNANGLNFIQMNTTLPNVTIFATGGTIAGSGSSSTATTGYTSGAVGVLSLIDAVPFMLDVANVAGVQVANVGSEDITSDILISMSKKLNRVVCEDPTMAGAVITHGTDTLEETAFFLDATVNCGKPIVIVGAMRPSTAISADGPFNLLEAVTVAASTSARDRGAMVVMNDRIASAYYVTKTNANTMDTFKAMEMGYLGEMISNTPFFFYPPVKPTGKVAFDITNVTEIPRVDILFSYEDMHNDTLYNAISSGAQGIVIAGAGAGGVTTSFNEAIEDVINRLEIPVVQSMRTVNGEVPLSDVSSDTATHIASGYLNPQKSRILLGLLLSQGKNITEIADVFALGTDA

SEQ ID NO: 71927 - protein, 361 aa, Aspergillus niger
SPLLYSRTTNETFVFTNANGLNFTQMNTTLPNVTIFATGGTIAGSDSSSTATTGYTSGAVGVLSLIDAVPSMLEVANVAGVQVANVGSEDITSDILISMSKKLNRVVCEDPTMAGAVITHGTDTLEETAFFLDATVNCGKPIVIVGAMRPSTTISADGPFNLLEAVTVAASTSARDRGAMVVMNDRIASAYYVTKTNANTMDTFKAMEMGYLGEMISNTPFFFYPPVKPTGKVAFDITNVTEIPHVDILFSYEDMHNDTLYNAISSGAQGIVIAGAGAGGVTTSFNEAIEDVINRLEIPVVQSMRTVNGEVPLSDVSSDTATHIASGYLNPQKSRILLGLLLSQGKNITEIADVFALGTDA

SEQ ID NO: 71928 - protein, 361 aa, Aspergillus niger
SPLLYSRTTNETFVFTNANGLNFIQMNTTLPNVTIFATGGTIAGSDSSPTATTGYTSGAVGVLSLIDAVPSMLDVANVAGVQVANVGSEDITSDILISMSKKLNRVVCEDPTMAGAVITHGTDTLEETAFFLDATVNCGKPIVIVGAMRPSTAISADGPFNLLEAVTVAASTSARDRGAMVVMNDRIASAYYVTKTNANTMDTFKAMEMGYLGEMISNTPFFFYPPVKPTGKVAFDITNVTEIPRVDILFSYEDMHNDTLYNAISSGAQGIVIAGAGAGGVTTSFNEAIEDVINRLEIPVVQSMRTVNGEVPLSDVSSDTATHIASGYLNPQKSRILLGLLLSQGKNITEIADMFALGTDA

SEQ ID NO: 71929 - protein, 361 aa, Aspergillus niger
SPLLYSRTTNGTFVFANANGLNFTQMNTTLPNVTIFATGGTIAGSHSSSTATTGYTSGAVGVLSLIDAVPSMLDVANVAGVQVANVGSEDITSDILISMSKKLNRVVCEDPTMAGAVITHGTDTLEETAFFLDATVNCGKPIVIVGAMRPSTAISADGPFNLLEAVTVAASTSARDRGAMVVMNDRIASAYYVTKTNANTMDTFKAMEMGYLGEMISNTPFFFYPPVKPTGKVAFDITNVTEIPRVDILFSYEDMHNDTLYNAISSGAQGIVIAGAGAGGVTTSFNEAIEDVINRLEIPVVQSMRTVNGEVPLSDVSSDTATHIASGYLNPQKSRILLGLLLSQGKNITEIADVFALGTDA

SEQ ID NO: 71930 - protein, 361 aa, Aspergillus niger
SPLLYSRTTNETFVFTNANGLNFTQMNTTLPNVTIFATGGTIAGSGSSSTATTGYTSGAVGVLSLIDAVPSMLDVANVAGVQVANVGSEDITSDILISMSKKLNRVVCEDPTMASAVITHGTDTLEETAFFLDATVNCGKPIVIVGAMRPSTAISADGPFNLLEAVTVAASTSARDRGAMVVMNDRIASAYYVTKTNANTMDTFKAMEMGYLGEMISNTPFFFYPPVKPTGKVAFDITNVTEIPRVDILFSYEDMHNDTLYNAISSGAQGIVIAGVGAGGVTTSFNEAIEDVINRLEIPVVQSMRTVNGEVPLSDVSSDTATHIASGYLNPQKSRILLGLLLSQGKNITEIADVFALGTDA

SEQ ID NO: 71931 - protein, 361 aa, Aspergillus niger
SPLLYSRTTNETFVFTNANGLNFTQMNTTLPNVTIFATGGTIAGSDSSSTATTGYKAGAVGVLSLIDAVPSMLDVANVAGVQVANVGSEDITSDILISMSKKLNRVVCEDPTMAGAVITHGTDTLEETAFFLDATVNCGKPIVIVGAMRPSTAISADGPFNLLEAVTVAASTSARDRGAMVVMNDRIASAYYVTKTNANTMDTFKAMEMGYLGEMISNTPFFFYPPVKPTGKVAFDITNVTEIPRVDILFSYEDMHNDTLYNAISSGAQGIVIAGSGAGGVTTSFNEAIEDVINRLEIPVVQSMRTVNGEVPLSDVSSDTATHIASGYLNPQKSRILLGLLLSQGKNITEIADVFALGTDA

SEQ ID NO: 71932 - protein, 361 aa, Aspergillus niger
SPLLYSRTTNETFVFTNANGLNFTQMNTTLPNVTIFATGGTIAGSDSSSTATTGYTSGAVGVLSLIDAVPPMLDVANVAGVQVANVGSEDITSDILISMSKKLNRVVCEDPTMAGAVITHGTDTLEETAFFLDATVNCGKPIVLVGAMRPSTAISADGPFNLLEAVTVAASTSARDRGAMVVMNDRIASAYYVTKTNANTMDTFKAMEMGYLGEMISNTPFFFYPPVKPTGKVAFDITNVTEIPCVDILFSYEDMHNDTLYNAISSGAQGIVIAGAGAGGVTTSFNEAIEDVINRLEIPVVQSMRTVNGEVPLSDVSSDTATHIASGYLNPQKSRILLGLLLSQGKNITEIADVFALGTDA

SEQ ID NO: 71933 - protein, 361 aa, Aspergillus niger
SPLLYSRTTNETFVFTNANGLNFTQMNTTLPNVTIFATGGTIAGSGSSSTATTGYTSGAVGVLSLIDAVPSMLDVANVAGVQVANVGSEDITSDILISMSKNLNRVVCEDPTMAGAVITHGTDTLEETAFFLDATVNCGKPIVIVGAMRPSTAISADGPFNLLEAVTVAASTSARDRGAMVVMNDRIASAYYVTKTNANTMDTFKAMEMGYLGEMISNTPFFFYPPVKPTGKVAFDITNVTEIPCVDILFSYEDMHNDTLYNAISSGAQGIVIAGAGAGGVTTSFNEAIEDVINRLEIPVVQSMRTVNGEVPLSDVSSDTATHIASGYLNPQKSRILLGLLLSQGKNITEIADVFALGTDA

SEQ ID NO: 71934 - protein, 378 aa, Aspergillus oryzae
MGVNFKVLALSALATISHASPLLYPRATDSNVTYVFTNPNGLNFTQMNTTLPNVTIFATGGTIAGSSADKTATTGYKAGAVGIQTLIDAVPEMLNVANVAGVQVTNVGSPDITSDILLRLSKQINEVVCNDPTMAGAVVTHGTDTLEESAFFLDATVNCRKPVVIVGAMRPSTAISADGPLNLLQSVTVAASPKARDRGALIVMDDRIVSAFYASKTNANTVDTFKAIEMGNLGEVVSNKPYFFYPPVKPTGKTEVDIRNITSIPRVDILYSYEDMHNDTLYSAIDNGAKGIVIAGSGSGSVSTPFSAAMEDITTKHNIPIVRSTRVGNGEVPSSAESSQIASGYLNPAKSRVLLGLLLAQGKSIEEMRAVFERIGVA

SEQ ID NO: 71935 - protein, 378 aa, Aspergillus oryzae
MGVNFKVLALSALATISHASPLLYPRATDSNVTYVFTNPNGLNFTQMNTTLPNVTIFATGGTIAGSSADKTATTGYKAGAVGIQTLIDAVPEMLNVANVAGVQVTNVGSPDITSDILLRLSKQINEVVCNDPTMAGAVVTHGTDTLEESAFFLDATVNCRKPVVIVGAMRPSTAISADGPLNLLQSVTVAASPKARDRGALIVMDDRIVSAFYASKTNANTVDTFKAIEMGNLGEVVSNKPYFFYPPVKPTGKTEVDIRKIDSIPRVDILYSYEDMHNDTLYSAIDNGAKGIVIAGSGSGSVSTPFSAAMEDITTKHNIPIVASTRTGNGEVPSSAESSQIASGYLNPAKSRVLLGLLLAQGKSIEEMRAVFERIGVA

SEQ ID NO: 71936 - protein, 378 aa, Aspergillus oryzae
MGVNFKVLALSALATISHASPLLYPRATDSNVTYVFTNPNGLNFTQMNTTLPNVTIFATGGTIAGSSADKTATTGYKAGAVGIQTLIDAVPEMLNVANVAGVQVTNVGSPDITSDILLRLSKQINEVVCNDPTMAGAVVTHGTDTLEESAFFLDATVNCRKPVVIVGAMRPSTAISADGPLNLLQSVTVAASPKARDRGALIVMDDRIVSAFYASKTNTTTVDTFKAIEMGNLGEVVSNKPYFFYPPVKPTGKTEVDIRNITSIPRVDILYSYEDMHNDTLYSAIDNGAKGIVIAGSGSGSVSTPFSAAMEDITTKHNIPIVASTRTGNGEVPSSAESSQIASGYLNPAKSRVLLGLLLAQGKSIEEMRAVFERIGVA

SEQ ID NO: 71937 - protein, 378 aa, Aspergillus oryzae
MGVNFKVLALSALATISHASPLLYPRATDSNVTYVFTNPNGLNFTQMNTTLPNVTIFATGGTIAGSSADKTATTGYKAGAVGIQTLIDAVPEMLNVANVAGVQVTNVGSPDITSDILLRLSKQINEVVCNDPTMAGAVVTHGTDTLEESAFFLDATVNCRKPVVIVGAMRPSTAISADGPLNLLQSVTVAASPKARDRGALIVMDDRIVSAFYASKTNANTVDTFKAIEMGNLGEVVSNKPYFFYPPVKPTGKTEVDIRNITSLPKVDILYSYEDMHNDTLYSAIDNGAKGIVIAGSGSGSVSTPFSAAMEDITTKHNIPIVASTRTGNGEVPSSAESSQIASGYLNPAKSRVLLGLLLAQGKSIEEMRAVFERIGVA

SEQ ID NO: 71938 - protein, 378 aa, Aspergillus oryzae
MGVNFKVLALSALATISHASPLLYPRATDSNVTYVFTNPNGLNFTQMNTTLPNVTIFATGGTIAGSSADKTATTGYKAGAVGIQTLIDAVPEMLNVANVAGVQVTNVGSPDITSDILLRLSKQINEVVCNDPTMAGIVITHGTDTLEESAFFLDATVNCRKPVVIVGAMRPSTAISADGPLNLLQSVTVAASPKARDRGALIVMDDRIVSAFYASKTNANTVDTFKAIEMGNLGEVVSNKPYFFYPPVKPTGKTEVDIRNITSIPRVDILYSYEDMHNDTLYSAIDNGAKGIVIAGSGSGSVSTPFSAAMEDITTKHNIPIVASTRTGNGEVPSSAESSQIASGYLNPAKSRVLLGLLLAQGKSIEEMRAVFERIGVA

SEQ ID NO: 71939 - protein, 361 aa, Aspergillus niger
SPLLYSRTTNETFVFTNANGLNFTQMNTTLPNVTIFATGGTIAGSDSSSTATTGYTSGAVGVLSLIDAVPSMVDVANVAGVQVANVGSEDITSDILISMSKNLNRVVCEDPTMAGAVITHGTDTLEETAFFLDATVNCGKPIVIVGAMRPSTAISADGPFNLLEAVTVAASTSARDRGAMVVMNDRIASAYYVTKTNANTMDTFKAMEMGHLGEMISNTPFFFYPPVKPTGKVAFDITNVTEIPCVDILFSYEDMHNDTLYNAISSGAQGIVIAGAGAGGVTTSFNEAIEDVINRLEIPVVQSMRTVNGEVPLSDVSSDTATHIASGYLNPQKSRILLGLLLSQGKNITEIADVFALGTDA

SEQ ID NO: 71940 - protein, 378 aa, Aspergillus oryzae
MGVNFKVLALSALATISHASPLLYPRATDSNVTYVFTNPNGLNFTQMNTTLPNVTIFATGGTIAGSSADKTATTGYKAGAVGIQTLIDAVPEMLNVANVAGVQVTNVGSPDITSDILLRLSKQINEVVCNDPTMAGAVVTHGTDTLEESAFFLDATVNCRKPVVIVGAMRPSTAISADGPLNLYNAVTVAASPKARDRGALIVMDDRIVSAFYASKTNANTVDTFKAIEMGNLGEVVSNKPYFFYPPVKPTGKTEVDIRNITSIPRVDILYSYEDMHNDTLYSAIDNGAKGIVIAGSGSGSVSTPFSAAMEDITTKHNIPIVASTRTGNGEVPSSAESSQIASGYLNPAKSRVLLGLLLAQGKSIEEMRAVFERIGVA

SEQ ID NO: 71941 - protein, 378 aa, Aspergillus oryzae
MGVNFKVLALSALATISHASPLLYPRATDSNVTYVFTNPNGLNFTQMNTTLPNVTIFATGGTIAGSSADKTATTGYKAGAVGIQTLIDAVPEMLNVANVAGVQVTNVGSPDITSDILLRLSKQINEVVCNDPTMAGAVVTHGTDTLEESAFFLDATVNCRKPVVIVGAMRPSTAISADGPLNLLQSVTVAASPKARDRGALIVMDDRIVSARYVTKTNANTVDTFKAIEMGNLGEVVSNKPYFFYPPVKPTGKTEVDIRNITSIPRVDILYSYEDMHNDTLYSAIDNGAKGIVIAGSGSGSVSTPFSAAMEDITTKHNIPIVASTRTGNGEVPSSAESSQIASGYLNPAKSRVLLGLLLAQGKSIEEMRAVFERIGVA

SEQ ID NO: 71942 - protein, 378 aa, Aspergillus oryzae
MGVNFKVLALSALATISHASPLLYPRATDSNVTYVFTNPNGLNFTQMNTTLPNVTIFATGGTIAGSSADKTATTGYKAGAVGIQTLIDAVPEMLNVANVAGVQVTNVGSPDITSDILLRLSKQINEVVCNDPTMAGAVVTHGTDTLEESAFFLDATVNCRKPVVIVGAMRPSTAISADGPLNLLQSVTVAASPKARDRGALIVMDDRIVSAFYASKTNANTVDTFKAIEMGNLGEVVSNKPYFFYPPVKPTGKTEVDIRNITSIPRVDILYSYEDMHNDTLYSAIDNGAKGIVIAGSGSGSVSTPFSAAMEDITTKHGIVVVASTRTGNGEVPSSAESSQIASGYLNPAKSRVLLGLLLAQGKSIEEMRAVFERIGVA

SEQ ID NO: 71943 - protein, 378 aa, Aspergillus oryzae
MGVNFKVLALSALATISHASPLLYPRATDSNVTYVFTNPNGLNFTQMNTTLPNVTIFATGGTIAGSSADKTATTGYKAGAVGIQTLIDAVPEMLNVANVAGVQVTNVGSPDITSDILLRLSKQINEVVCNDPTMAGAVVTHGTDTLEESAFFLDATVNCRKPVVIVGAMRPSTAISADGPLNLLQSVTVAASPKARDRGALIVMDDRIVSAFYASKTNANTVDTFKAIEMGNLGEVVSNKPYFFYPPVKPTGKTEVDIRNITSIPRVDILYSYEDMHNDTLYSAIDNGAKGIVIAGSGSGSVSTPFSAAMEDITTKHNIPIVASTRTGNGEVPSSAESSQIASGYLNPQKARILLGLLLAQGKSIEEMRAVFERIGVA

SEQ ID NO: 71944 - protein, 361 aa, Aspergillus niger
SPLLYSRTTNETFVFTNANGLNFTQMNTTLPNVTIFATGGTIAGSHSSSTATTGYTSGTFGVLSLIDAVPSMLDVANVAGVQVVNVGSEDITSDILISMSKKLNRVVCEDPTMAGAVITHGTDTLEETAFFLDATVNCGKPIVIVGAMRPSTTISADGPFNLLEAVTVAASTSARDRGAMVVMNDRIASAYYVTKTNANTMDTFKAMEMGYLGEMISNTPFFFYPPVKPTGKVAFDITNVTEIPRVDILFSYEDMHNDTLYNAISSGAQGIVIAGAGAGGVTTSFNEAIEDVINRLEIPVVQSMRTVNGEVPLSDVSSDTATHIASGYLNPQKSRILLGLLLSQGKNITEIADVFALGTDA

SEQ ID NO: 71945 - protein, 361 aa, Aspergillus niger
SPLLYSRTTNETFVFTNANGLNFIQMNTTLPNVTIFATGGTIAGSDSSPTATTGYTSGAVGVLSLIDAVPVMLDVANVAGVQVANVGSEDITSDILISMSKKLNRVVCEDPTMAGAVITHGTDTLEETAFFLDATVNCGKPIVIVGAMRPSTAISADGPFNLLEAVTVAASTSARDRGAMVVMNDRIASAYYVTKTNANTMDTFKAMEMGYLGEMISNTPFFFYPPAKPTGKVAFDITNVTEIPCVDILFSYEDMHNDTLYNAISSGAQGIVIAGAGAGGVTTSFNEAIEDVINRLEIPVVQSMRTVNGEVPLSDVSSDTATHIASGYLNPQKSRILLGLLLSQGKNITEIADVFALGTDA

SEQ ID NO: 71946 - protein, 361 aa, Aspergillus niger
SPLLYSRTTNETFVFTNANGLNFIQMNTTLPNVTIFATGGTIAGSGSSSTATTGYTSGAVGVLSLIDAVPVMLDVANVAGVQVANVGSEDITSGILISMSKKLNHVVCEDPTMAGAVITHGTDTLEETAFFLDATVNCGKPIVIVGAMRPSTAISADGPFNLLEAVTVAASTSARDRGAMVVMNDRIASAYYVTKTNANTMDTFKAMEMGYLGEMISNTPFFFYPPVKPTGKVAFDITNVTEIPRVDILFSYEDMHNDTLYNAISSGAQGIVIAGAGAGGVTTSFNEAIEDVINRLEIPVVQSMRTVNGEVPLSDVSSDTATHIASGYLNPQKSRILLGLLLSQGKNITEIADVFALGTDA

SEQ ID NO: 71947 - protein, 378 aa, Aspergillus oryzae
MGVNFKVLALSALATISHASPLLYPRATDSNVTYVFTNPNGLNFTQMNTTLPNVTIFATGGTIAGSSADKTATTGYKAGAVGIQTPIDAVPEMLNVANVAGDQVTNVGSPDITSDILLRLSKQINEVVCNDPTMAGAVVTHGTDTLEESAFFLDATVNCRKPVVIVGAMRPSTAISADGPLNLLQSVTVAASPKARDRGALIVMDDRIVSAFYASKTNANTVDTFKAIEMGNLGEVVSNKPYFFYPPVKPTGKTEVDIRNITSIPRVDILYSYEDMHNDTLYSAIDNGAKGIVIAGSGSGSVSTPFSAAMEDITTKHNIPIVRSTRVGNGEVPSSAESSQIASGYLNPAKSRVLLGLLLAQGKSIEEMRAVFERIGVA

SEQ ID NO: 71948 - protein, 378 aa, Aspergillus oryzae
MGVNFKVLALSALATISHASPLLYPRATDSNVTYVFTNPNGLNFTQMNTTLPNVTIFATGGTIAGSSADKTATTGYKAGAVGVDTLIDAVPEMLNVANVAGVQVTNVGSPDITSDILLRLSKQINEVVCNDPTMAGAVVTHGTDTLEESAFFLDATVNCRKPVVIVGAMRPSTAISADGPLNLLQSVTVAASPKARDRGALIVMDDRIVSAFYASKTNANTVDTFKAIEMGNLGEVVSNKPYFFYPPVKPTGKTEVDIRNITSIPRVDILYSYEDMHNDTLYSAIDNGAKGIVIAGSGSGSVSTPFSAAMEDITTKHNIPIVRSTRVGNGEVPSSAESSQIASGYLNPAKSRVLLGLLLAQGKSIEEMRAVFERIGVA

SEQ ID NO: 71949 - protein, 378 aa, Aspergillus oryzae
MGVNFKVLALSALATISHASPLLYPRATDSNVTYVFTNPNGLNFTQMNTTLPNVTIFATGGTIAGSSADKTATTGYKAGAVGIQTLIDAVPEMLNVANVAGVQVTNVGSPDITSDILLRLSKQINEVVCNDPTMAGAVVTHGTDTLEESAFFLDATVNCRKPVVIVGAMRPSTAISADGPLNLLQSVTVAASPKARDRGALIVMDDRIGSAFYASKTNANTVDTFKAIEMGNLGEVVSNKPYFFYPPVKPTGKTEVDIRNITSIPRVDILYSYEDMHNDTLYSAIDNGAKGIVIAGSGSGSVSTPFSAAMEDITTKHNIPIVRSSRVGNGEVPSSAESSQIASGYLNPAKSRVLLGLLLAQGKSIEEMRAVFERIGVA

SEQ ID NO: 71950 - protein, 378 aa, Aspergillus oryzae
MGVNFKVLALSALATISHASPLLYPRATDSNVTYVFTNPNGLNFTQMNTTLPNVTIFATGGTIAGSSADKTATTGYKAGAVGIQTLIDAVPEMLNVANVAGVQVTNVGSPDITSDILLRLSKQINEVVCNDPTMAGAVVTHGTDTLEESAFFLDATVNCRKPVVIVGAMRPSTAISADGPLNLLQSVTVAASPKARDRGALIVMNDRIVSAFYASKTNANTVDTFKAIEMGNLGEVVSNKPYFFYPPVKPTGKTEVDIRNITSIPRVDILYSYEDMHNDTLYSAIDNGAKGIVIAGSGSGSVSTPFSAAMEDITTKHNIPIVRSTRVGNGEVPSSAESSQIASGYLNPQKARILLGLLLAQGKSIEEMRAVFERIGVA

SEQ ID NO: 71951 - protein, 378 aa, Aspergillus oryzae
MGVNFKVLALSALATISHASPLLYPRATDSNVTYVFTNPNGLNFTQMNTTLPNVTIFATGGTIAGSSADKTATTGYKAGAVGIQTLIDAVPELKDLANVAGVQVTNVGSPDITSDILLRLSKQINEVVCNDPTMAGAVVTHGTDTLEESAFFLDATVNCRKPVVIVGAMRPSTAISADGPLNLLQSVTVAASPKARDRGALIVMDDRIVSAFYASKTNANTVDTFKAIEMGNLGEVVSNKPYFFYPPVKPTGKTEVDIRNITSIPRVDILYSYEDMHNDTLYSAIDNGAKGIVIAGSGSGSVSTPFSAAMEDITTKHNIPIVASTRTGNGEVPSSAESSQIASGYLNPAKSRVLLGLLLAQGKSIEEMRAVFERIGVA

SEQ ID NO: 71952 - protein, 378 aa, Aspergillus oryzae
MGVNFKVLALSALATISHASPLLYPRATDSNVTYVFTNPNGLNFTQMNTTLPNVTIFATGGTIAGSSADKTATTGYKAGAVGIQTLIDAVPEMLNVANVAGVQVTNIGSPDITSDILLRLSKQINEVVCNDPTMAGAVVTHGTDTLEESAFFLDATVNCRKPVVIVGAMRPSTAISADGPLNLLQSVTVAASPKARDRGALIVMDDRIVSAFYASKTNANTVDTFKAIEMGNLGEVVSNKPYFFYPPVKPTGKTEVDIRNITSIPRVDILYSYEDMHNDTLYSAIDNGAKGIVIAGSGSGSVSTPFSAAMEDITTKHNIPIVRSSRVGNGEVPSSAESSQIASGYLNPAKSRVLLGLLLAQGKSIEEMRAVFERIGVA

SEQ ID NO: 71953 - protein, 378 aa, Aspergillus oryzae
MGVNFKVLALSALATISHASPLLYPRATDSNVTYVFTNPNGLNFTQMNTTLPNVTIFATGGTIAGSSADNTATTGYKAGAVGIQTLIDAVPEMLNVANVAGVQVTNVGSPDITSDILLRLSKQINEVVCNDPTMAGAVVTHGTDTLEESAFFLDATVNCRKPVVIVGAMRPSTAISADGPLNLLQSVTVAASPKARDRGALIVMNDRIVSAFYASKTNANTVDTFKAIEMGNLGEVVSNKPYFFYPPVKPTGKTEVDIRNITSIPRVDILYSYEDMHNDTLYSAIDNGAKGIVIAGSGSGSVSTPFAAAMEDITTKHNIPIVRSTRVGNGEVPSSAESSQIASGYLNPQKARILLGLLLAQGKSIEEMRAVFERIGVA

SEQ ID NO: 71954 - protein, 378 aa, Aspergillus oryzae
MGVNFKVLALSALATISHASPLLYPRATDSNVTYVFTNPNGLNFTQMNTTLPNVTIFATGGTIAGSSADKTATTGYKAGAVGIQTLIDAVPEMLNVANVAGVQVTNVGSPDITSDILLRLSKQINEVVCNDPTMAGAVVTHGTDTLEESAFFLDATVNCRKPVVIVGAMRPATAISADGPLNLLQSVTVAASPKARDRGALIVMDDRIVSAFYASKTNANTVDTFKAIEMGNLGEVVSNKPYFFYPPVKPTGKTEVDIRNITSIPRVDILYSYEDMHNDTLYSAIDNGAKGIVIAGSGSGSVSTPFSAAMEDITTKHNIPIVRSSRVGNGEVPSSAESSQIASGYLNPAKSRVLLGLLLAQGKSIEEMRAVFERIGVA

SEQ ID NO: 71955 - protein, 378 aa, Aspergillus oryzae
MGVNFKVLALSALATISHASPLLYPRATDSNVTYVFTNPNGLNFTQMNTTLPNITILATGGTIAGSSADKTATTGYKAGAVGIQTLIDAVPEMLNVANVAGVQVTNVGSPDITSDILLRLSKQINEVVCNDPTMAGAVVTHGTDTLEESAFFLDATVNCRKPVVIVGAMRPSTAISADGPLNLLQSVTVAASPKARDRGALIVMDDRIVSAFYASKTNANTVDTFKAIEMGNLGEVVSNKPYFFYPPVKPTGKTEVDIRNITSIPRVDILYSYEDMHNDTLYSAIDNGAKGIVIAGSGSGSVSTPFSAAMEDITTKHNIPIVRSSRVGNGEVPSSAESSQIASGYLNPAKSRVLLGLLLAQGKSIEEMRAVFERIGVA

SEQ ID NO: 71956 - protein, 378 aa, Aspergillus oryzae
MGVNFKVLALSALATISHASPLLYPRATDSNVTYVFTNPNGLNFTQMNTTLPNVTIFATGGTIAGSSADKTATTGYKAGAVGIQTLIDAVPEMLNVANVAGVQVTNVGSPDITSDILLRLSKQINEVVCNDPTMAGAVVTHGTDTLEESAFFLDATVNCRKPVVIVGAMRPSTAISADGPLNLLQSVTVAASPKARDRGALIVMDDRIVSAFYASKTNANTVDTFKAIEMGNLGEVVSNKPYFFYPPVKPTGKTEVDIRNITSIPRVDILYSYEDMHNDTLYSAIDNGAKGIVIAGSGSGSVSTPFSAAMEDITTKHNIPIVRSTRVGNGEVPSSAESSQIASGYLNPQKARILLGLLLAQGKSIEEMRAVFERIGVA

SEQ ID NO: 71957 - protein, 378 aa, Aspergillus oryzae
MGVNFKVLALSALATISHASPLLYPRATDSNVTYVFTNPNGLNFTQMNTTLPNVTIFATGGTIAGSSADKTATTGYKAGAVGIQTLIDAVPEMLNVANVAGVQVTNVGSPDITSDILLRLSKQINEVVCNDPTMAGAVVTHGTDTLEESAFFLDATVNCRKPVVIVGAMRPSTAISADGPLNLLQSVTVAASPKARDRGALIVMNDRIVSAFYASKTNANTVDTFKAIEMGNLGEVVSNKPYFFYPPVKPTGKTEVDIRNITSIPRVDILYSYEDMHNDTLYSAIDNGAKGIVIAGSGSGSVSTPFSAAMEDITTKHNIPIVRSTRVGNGEVPSSAESSQIASGYLNPQKARILLGLLLAQGRSIEEMRAVFERIGVA

SEQ ID NO: 71958 - protein, 378 aa, Aspergillus oryzae
MGVNFKVLALSALATISHASPLLYPRATDSNVTYVFTNPNGLNFTQMNTTLPNVTIFATGGTIAGSSADNTATTGYKAGAVGIQTLIDAVPEMLNVANVAGVQVTNVGSPDITSDILLRLSKQINEVVCNDPTMAGAVVTHGTDTLEESAFFLDATVNCRKPVVIVGAMRPSTAISADGPLNLLQSVTVAASPKARDRGALIVMNDRIVSAFYASKTNANTVDTFKAIEMGNLGEVVSNKPYFFYPPVKPTGKTEVDIRNITSIPRVDILYSYEDMHNDTLYSAIDNGAVGIVIAGSGSGSVSTPFAAAMEDITTKHNIPIVRSTRVGNGEVPSSAESSQIASGYLNPQKARILLGLLLAQGKSIEEMRAVFERIGVA

SEQ ID NO: 71959 - protein, 378 aa, Aspergillus oryzae
MGVNFKVLALSALATISHASPLLYPRATDSNVTYVFTNPNGLNFTQMNTTLPNVTIFATGGTIAGSSADRTATTGYKAGAVGIQTLIDAVPEMLNVANVAGVQVTNVGSPDITSDILLRLSKQINEVVCNDPTMAGAVVTHGTDTLEESAFFLDATVNCRKPVVIVGAMRPSTAISADGPLNLLQSVTVAASPKARDRGALIVMNDRIVSAFYASKTNANTVDTFKAIEMGNLGEVVSNKPYFFYPPVKPTGKTEVDIRNITSIPRVDILYSYEDMHNDTLYSAIDNGAKGIVIAGSGSGSVSTPFAAAMEDITTKHNIPIVRSTRVGNGEVPSSAESSQIASGYLNPQKARILLGLLLAQGKSIEEMRAVFERIGVA

SEQ ID NO: 71960 - protein, 378 aa, Aspergillus oryzae
MGVNFKVLALSALATISHASPLLYPRATDSNVTYVFTNPNGLNFTQMNTTLPNVTIFATGGTIAGSSADKTATTGYKAGAVGIQTLIDAVPEMLNVANVAGVQVTNVGSPDITSDILLRLSKQINEVVCNDPTMAGAVVTHGTDTLEESAFFLDATVNCRKPVVIVGAMRPSTAISADGPLNLLQSVTVAASPKARDRGALIVMDDRIVSAFYASKTNANTVDTFKAIEMGNLGEVVSNKPYFFYPPVKPTGKTEVDIRKIDSIPRVDILYSYEDMHNDTLYSAIDNGAKGIVIAGSGSGSVSTPFSAAMEDITTKHNIPIVRSSRVGNGEVPSSAESSQIASGYLNPAKSRVLLGLLLAQGKSIEEMRAVFERIGVA

SEQ ID NO: 71961 - protein, 378 aa, Aspergillus oryzae
MGVNFKVLALSALATISHASPLLYPRATDSNVTYVFTNPNGLNFTQMNTTLPNVTIFATGGTIAGSSADKTATTGYKAGAVGIQTLIDAVPEMLNVANVAGVQVTNVGSPDITSDILLRLSKQINEVVCNDPTMAGAVVTHGTDTLEESAFFLDATVNCRKPVVIVGAMRPSTAISADGPLNLLQSVTVAASPKARDRGALIVMNDRIVSAFYASKTNANTVDTFKAIEMGNLGEVVSNKPYFFYPPVKPTGKTEVDIRNITSIPRVDILYSYEDMHNDTLYSAIDNGAKGIVIAGSGSGSVSTPFAAAMEDITTKHNIPIVRSTRVGNGEVPSSAESSQIASGYLNPQKARILLGLLLAQGKSIEEMRAVFERIGVA

SEQ ID NO: 71962 - protein, 379 aa, Aspergillus oryzae
MGVNFKVLALSALATISHASPLLYPRATDSNVTYVFTNPNGLNFTQMNTTLPNVTIFATGGTIAGSSADKTATTGYKAGAVGIQTLIDAVPEMLNVANVAGVQVTNVGSPDITSDILLRLSRKQINEVVCNDPTMAGAVVTHGTDTLEESAFFLDATVNCRKPVVIVGAMRPSTAISADGPLNLLQSVTVAASPKARDRGALIVMNDRIVSAFYASKTNANTVDTFKAIEMGNLGEVVSNKPYFFYPPVKPTGKTEVDIRNITSIPRVDILYSYEDMHNDTLYSAIDNGAKGIVIAGSGSGSVSTPFAAAMEDITTKHNIPIVRSTRVGNGEVPSSAESSQIASGYLNPQKARILLGLLLAQGKSIEEMRAVFERIGVA

SEQ ID NO: 71963 - protein, 375 aa, Aspergillus oryzae
MGVNFKVLALSALATISHASPLLYPRSNVTYVFTNPNGLNFTQMNTTLPNVTIFATGGTIAGSSADKTATTGYKAGAVGIQTLIDAVPEMLNVANVAGVQVTNVGSPDITSDILLRLSKQINEVVCNDPTMAGAVVTHGTDTLEESAFFLDATVNCRKPVVIVGAMRPSTAISADGPLNLLQSVTVAASPKARDRGALIVMNDRIVSAFYASKTNANTVDTFKAIEMGNLGEVVSNKPYFFYPPVKPTGKTEVDIRNITSIPRVDILYSYEDMHNDTLYSAIDNGAKGIVIAGSGSGSVSTPFAAAMEDITTKHNIPIVRSTRVGNGEVPSSAESSQIASGYLNPQKARILLGLLLAQGKSIEEMRAVFERIGVA

SEQ ID NO: 71964 - protein, 378 aa, Aspergillus oryzae
MGVNFKVLALSALATISHASPLLYPRATDSNVTYVFTNPNGLNFTQMNTTLPNVTIFATGGTIAGSSADRTATTGYKAGAVGIQTLIDAVPEMLNVANVAGVQVTNVGSPDITSDILLRLSKQINEVVCNDPTMAGAVVTHGTDTLEESAFFLDATVNCRKPVVIVGAMRPSTAISADGPLNLLQSVTVAASPKARDRGALIVMNDRIVSAFYASKTNANTVDTFKAIEMGNLGEVVSNKPYFFYPPVKPTGKTEVDIRNITSIPRVDILYSYEDMHNDTLYSAIDNGAKGIVIAGSGSGSVSTPFAAAMEDITTKHNIPIVRSTRVGNGEVPSSAEWSQIASGYLNPQKARILLGLLLAQGKSIEEMRAVFERIGVA

SEQ ID NO: 71965 - protein, 378 aa, Aspergillus oryzae
MGVNFKVLALSALATISHASPLLYPRATDSNVTYVFTNPNGLNFTQMNTTLPNVTIFATGGTIAGSSADKTATTGYKAGAVGIQTLIDAVPEMLNVANVAGVQVTNVGSPDITSDILLRLSKQINEVVCNDPTMAGAVVTHGTDTLEESAFFLDATVNCRKPVVIVGAMRPSTAISADGPLNLLQSVTVAASPLARDRGALIVMNDRIVSAFYASKTNANTVDTFKAIEMGNLGEVVSNKPYFFYPPVKPTGKTEVDIRNITSIPRVDILYSYEDMHNDTLYSAIDNGAKGIVIAGSGSGSVSTPFAAAMEDITTKHNIPIVRSTRVGNGEVPSSAESSQIASGYLNPQKARILLGLLLAQGKSIEEMRAVFERIGVA

SEQ ID NO: 71966 - protein, 378 aa, Aspergillus oryzae
MGVNFKVLALSALATISHASPLLYPRATDSNVTYVFTNPNGLNFTQMNTTLPNVTIFATGGTIAGSSADKTATTGYKAGAVGIQTLIDAVPEMLNVANVAGVQVTNVGSPDITSDILLRLSKQINEVVCNDPTMAGAVVTHGTDTLEESAFFLDATVNCRKPVVIVGAMRPSTAISADGPLNLLQSVTVAASPKARDRGALIVMNDRIVSAFYASKTNANTVDTFKAIEMGNLGEVVSNKPYFFYPPVKPTGKTEVDIRNITSIPRVDILYSYEDMHNDTLYSAIDNGAVGIVIAGSGSGSVSTPFAAAMEDITTKHNIPIVRSTRVGNGEVPSSAESSQIASGYLNPQKARILLGLLLAQGKSIEEMRAVFERIGVA

SEQ ID NO: 71967 - protein, 378 aa, Aspergillus oryzae
MGVNFKVLALSALATISHASPLLYPRATDSNVTYVFTNPNGLNFTQMNTTLPNVTIFATGGTIAGSSADKTATTGYKAGAVGIQTLIDAVPEMLNVANVAGVQVTNVGSPDITSDILLRLSAQINEVVCNDPTMAGAVVTHGTDTLEESAFFLDATVNCRKPVVIVGAMRPSTAISADGPLNLLQSVTVAASPKARDRGALIVMNDRIVSAFYASKTNANTVDTFKAIEMGNLGEVVSNKPYFFYPPVKPTGKTEVDIRNITSIPRVDILYSYEDMHNDTLYSAIDNGAKGIVIAGSGSGSVSTPFAAAMEDITTKHNIPIVRSTRVGNGEVPSSAESSQIASGYLNPQKARILLGLLLAQGKSIEEMRAVFERIGVA

SEQ ID NO: 71968 - protein, 378 aa, Aspergillus oryzae
MGVNFKVLALSALATISHASPLLYPRATDSNVTYVFTNPNGLNFTQMNTTLPNVTIFATGGTIAGSSADKTATTGYKAGAVGIQTLIDAVPEMLNVANVAGVQVTNVGSPDITSDILLRLSKQINEVVCNDPTMAGAVVTHGTDTLEESAFFLDATVNCRKPVVIVGAMRPSTAISADGPLNLLQSVTVAASPKARDRGALIVMNDRIVSAFYASKTNANTVDTFKAIEMGNLGEVVSNKPYFFYPPVKPTGKTEVDIRNITSIPRVDILYSYEDMHNDTLYSAIDNGAKGIVIAGSGSGSVSTPFAAAMEDITTKHNIPIVRSTRVGNGEVPPSAESSQIASGYLNPQKARILLGLLLAQGKSIEEMRAVFERIGVA

SEQ ID NO: 71969 - protein, 378 aa, Aspergillus oryzae
MGVNFKVLALSALATISHASPLLYPRATDSNVTYVFTNPNGLNFTQMNTTLPNVTIFATGGTIAGSSADKTATTGYKAGAVGIQTLIDAVPEMLNVANVAGVQVTNVGSPDITSDILLRLSKQINEVVCNDPTMAGAVVTHGTDTLEESAFFLDATVNCRKPVVIVGAMRPSTAISADGPLNLLQSVTVAASPKARDRGALIVMNDRIVSAFYASKTNANTVDTFKAIEMGNLGEVVSNKPYFFYPPVKPTGKTEVDIRNITSIPRVDILYSYEDMHNDTLYSAIDNGAKGIVIAGSGSGSVSTPFAAAMEDITTKHNIPIVRSTRVGNGEVPWSAESSQIASGYLNPQKARILLGLLLAQGKSIEEMRAVFERIGVA

SEQ ID NO: 71970 - protein, 378 aa, Aspergillus oryzae
MGVNFKVLALSALATISHASPLLYPRATDSNVTYVFTNPNGLNFTQMNTTLPNVTIFATGGTIAGSSADKTATTGYKAGAVGIQTLIDAVPEMLNVANVAGVQVTNVGSPDITSDILLRLSKQINEVVCNDPTMAGAVVTHGTDTLEESAFFLDATVNCRKPVVIVGAMRPSTAISADGPLNLLQSVTVAASPKARDRGALIVMNDRIVSAFYASKTNANTVDTFKAIEMGNLGEVVSNKPYFFYPPVKPTGKTEVDIRNITSIPRVDILYSYEDMHNDTLYSAIDNGAKGIVIAGSGAGSVSTPFAAAMEDITTKHNIPIVRSTRVGNGEVPSSAESSQIASGYLNPQKARILLGLLLAQGKSIEEMRAVFERIGVA

SEQ ID NO: 71971 - protein, 378 aa, Aspergillus oryzae
MGVNFKVLALSALATISHASPLLYPRATDSNVTYVFTNPNGLNFTQMNTTLPNVTIFATGGTIAGSSADKTATTGYKAGAVGIQTLIDAVPEMLNVANVAGVQVTNVGSPDITSDILLRLSKQINEVVCNDPTMAGAVVTHGTDTLEESAFFLDATVNCRKPVVIVGAMRPSTAISADGPLNLLQSVTVAASPKARDRGALIVMNDRIVSAFYASKTNANTVDTFKAIEMGNLGEVVSNKPYFFYPPVKPTGKTEVDIRNITSIPRVDILYSYEDMHNDTLYSAIDNGAKGIVIAGSGSGSVSTPFAAAMEDITTKHNIPIVRSTRVGNGEVPSSAEWSQIASGYLNPQKARILLGLLLAQGKSIEEMRAVFERIGVA

SEQ ID NO: 71972 - protein, 378 aa, Aspergillus oryzae
MGVNFKVLALSALATISHASPLLYPRATDSNVTYVFTNPNGLNFTQMNTTLPNVTIFATGGTIAGSSADKTATTGYKAGAVGIQTLIDAVPEMLNVANVAGVQVTNVGSPDITSDILLRLSKQINEVVCNDPTMAGAVVTHGTDTLEESAFFLDATVNCRKPVVIVGAMRPSTAISADGPLNLLQSVTVAASPKARDRGALIVMNDRIVSAFYASKTNANTVDTFKAIEMGNLGEVVSNKPYFFYPPVKPTGKTEVDIRNITSIPRVDILYSYEDMHNDTLYCAIDNGAKGIVIAGSGSGSVSTPFAAAMEDITTKHNIPIVRSTRVGNGEVPSSAESSQIASGYLNPQKARILLGLLLAQGKSIEEMRAVFERIGVA

SEQ ID NO: 71973 - protein, 378 aa, Aspergillus oryzae
MGVNFKVLALSALATISHASPLLYPRATDSNVTYVFTNPNGLNFTQMNTTLPNVTIFATGGTIAGSSADKTATAGYKAGAVGIQTLIDAVPEMLNVANVAGVQVTNVGSPDITSDILLRLSKQINEVVCNDPTMAGAVVTHGTDTLEESAFFLDATVNCRKPVVIVGAMRPSTAISADGPLNLLQSVTVAASPKARDRGALIVMNDRIVSAFYASKTNANTVDTFKAIEMGNLGEVVSNKPYFFYPPVKPTGKTEVDIRNITSIPRVDILYSYEDMHNDTLYSAIDNGAKGIVIAGSGSGSVSTPFAAAMEDITTKHNIPIVRSTRVGNGEVPSSAESSQIASGYLNPQKARILLGLLLAQGKSIEEMRAVFERIGVA

SEQ ID NO: 71974 - protein, 378 aa, Aspergillus oryzae
MGVNFKVLALSALATISHASPLLYPRATDSNVTYVFTNPNGLNFTQMNTTLPNVTIFATGGTIAGSSADKTATTGYKAGAVGIQTLIDAVPEMLNVANVAGVQVTNVGSPDITSDILLRLSKQINEVVCNDPTMAGAVVTHGTDTLEESAFFLDATVNCRKPVVIVGAMRPSTAISADGPLNLLQSVTVAASPKARDRGALIVMNDRIVSAFYASKTNANTVDTFKAIEMGNLGEVVSNKPYFFYPPVKPTGKTEVDIRNITSIPRVDILYSYEDMHNDTLYSAIDNGAKGIVIAGSGSGSVSTPFAAAMEDITTKHNIPIVRSTRVGNGEVPSSASSSQIASGYLNPQKARILLGLLLAQGKSIEEMRAVFERIGVA

SEQ ID NO: 71975 - protein, 378 aa, Aspergillus oryzae
MGVNFKVLALSALATISHASPLLYPRATDSNVTYVFTNPNGLNFTQMNTTLPNVTIFATGGTIAGSSADKTATTGYKAGAVGIQTLIDAVPEMLNVANVAGDQVTNVGSPDITSDILLRLSKQINEVVCNDPTMAGAVVTHGTDTLEESAFFLDATVNCRKPVVIVGAMRPSTAISADGPLNLLQSVTVAASPKARDRGALIVMDDRIVSAFYASKTNANTVDTFKAIEMGNLGEVVSNKPYFFYPPVKPTGKTEVDIRNITSIPRVDILYSYEDMHNDTLYSAIDNGAKGIVIAGSGSGSVSTPFSAAMEDITTKHNIPIVRSTRVGNGEVPSSAESSQIASGYLNPQKARILLGLLLAQGKSIEEMRAVFERIGVA

SEQ ID NO: 71976 - protein, 378 aa, Aspergillus oryzae
MGVNFKVLALSALATISHASPLLYPRATDSNVTYVFTNPNGLNFTQMNTTLPNVTIFATGGTIAGSSADKTATTGYKAGAVGIQTLIDAVPEMLNVANVAGVQVTNVGSPDITSDILLRLSKQINEVVCNDPTMAGAVVTHGTDTLEESAFFLDATVNCRKPVVIVGAMRPSTAISADGPLNLLQSVTVAASPKARDRGALIVMNDRIVSAFYASKTNANTVDTFKAIEMGNLGEVVSNKPYFFYPPVLPTGKTEVDIRNITSIPRVDILYSYEDMHNDTLYSAIDNGAKGIVIAGSGSGSVSTPFAAAMEDITTKHNIPIVRSTRVGNGEVPSSAESSQIASGYLNPQKARILLGLLLAQGKSIEEMRAVFERIGVA

SEQ ID NO: 71977 - protein, 378 aa, Aspergillus oryzae
MGVNFKVLALSALATISHASPLLYPRATDSNVTYVFTNPNGLNFTQMNTTLPNVTIFATGGTIAGSSADKTATTGYKAGAVGIQTLIDAVPEMLNVANVAGVQVTNVGSPDITSDILLRLSKQINEVCCNDPTMAGAVVTHGTDTLEESAFFLDATVNCRKPVVIVGAMRPSTAISADGPLNLLQSVTVAASPKARDRGALIVMNDRIVSAFYASKTNANTVDTFKAIEMGNLGEVVSNKPYFFYPPVKPTGKTEVDIRNITSIPRVDILYSYEDMHNDTLYSAIDNGAKGIVIAGSGSGSVSTPFAAAMEDITTKHNIPIVRSTRVGNGEVPSSAESSQIASGYLNPQKARILLGLLLAQGKSIEEMRAVFERIGVA

SEQ ID NO: 71978 - protein, 378 aa, Aspergillus oryzae
MGVNFKVLALSALATISHASPLLYPRATDSNVTYVFTNPNGLNFTQMNTTLPNVTIFATGGTIAGSSADKTATTGYKAGAVGIQTLIDAVPEMLNVANVAGVQVTNVGSPDITSDILLRLSKQINEVVCNDPTMAGAVVTHGTDTLEESAFFLDATVNCRKPVVIVGAMRPSTAISADGPLNLLQSVTVAASPKARDRGALIVMNDRIVSAFYASKTNANTVDTFKAIEMGNLGEVVSNKEYFFYPPVKPTGKTEVDIRNITSIPRVDILYSYEDMHNDTLYSAIDNGAKGIVIAGSGSGSVSTPFAAAMEDITTKHNIPIVRSTRVGNGEVPSSAESSQIASGYLNPQKARILLGLLLAQGKSIEEMRAVFERIGVA

SEQ ID NO: 71979 - protein, 363 aa, Aspergillus oryzae
LSTASLVAALPATDSNVTYVFTNPNGLNFTQMNTTLPNVTIFATGGTIAGSSADNTATTGYKAGAVGIQTLIDAVPEMLNVANVAGVQVTNVGSPDITSDILLRLSKQINEVVCNDPTMAGAVVTHGTDTLEESAFFLDATVNCRKPVVIVGAMRPSTAISADGPLNLLQSVTVAASPKARDRGALIVMNDRIVSAFYASKTNANTVDTFKAIEMGNLGEVVSNKPYFFYPPVKPTGKTEVDIRNITSIPRVDILYSYEDMHNDTLYSAIDNGAKGIVIAGSGSGSVSTPFSAAMEDITTKHNIPIVASTRTGNGEVPSSAESSQIASGYLNPAKSRVLLGLLLAQGKSIEEMRAVFERIGVA

SEQ ID NO: 71980 - protein, 378 aa, Aspergillus oryzae
MGVNFKVLALSALATISHASPLLYPRATDSNVTYVFTNPNGLNFTQMNTTLPNVTIFATGGTIAGSSADKTATTGYKAGAVGIQTLIDAVPEMLNVANVAGVQVTNVGSPDITSDILLRLSKQINEVVCNDPTMAGAVVTHGTDTLEESAFFLDATVNCRKPVVIVGAMRPSTAISADGPLNLLQSVTVAASPLARDRGALIVMNDRIVSAFYASKTNANTVDTFKAIEMGNLGEVVSNKPYFFYPPVKPTGKTEVDIRNITSIPRVDILYSYEDMHNDTLYCAIDNGAKGIVIAGSGSGSVSTPFAAAMEDITTKHNIPIVRSTRVGNGEVPSSAESSQIASGYLNPQKARILLGLLLAQGKSIEEMRAVFERIGVA

SEQ ID NO: 71981 - protein, 378 aa, Aspergillus oryzae
MGVNFKVLALSALATISHASPLLYPRATDSNVTYVFTNPNGLNFTQMNTTLPNVTIFATGGTIAGSSADKCATTGYKAGAVGIQTLIDAVPEMLNVANVAGVQVTNVGSPDITSDILLRLSKQINEVVCNDPTMAGAVVTHGTDTLEESAFFLDATVNCRKPVVIVGAMRPSTAISADGPLNLLQSVTVAASPKARDRGALIVMNDRIVSAFYASKTNANTVDTFKAIEMGNLGEVVSCKPYFFYPPVKPTGKTEVDIRNITSIPRVDILYSYEDMHNDTLYSAIDNGAKGIVIAGSGSGSVSTPFAAAMEDITTKHNIPIVRSTRVGNGEVPSSAESSQIASGYLNPQKARILLGLLLAQGKSIEEMRAVFERIGVA

SEQ ID NO: 71982 - protein, 378 aa, Aspergillus oryzae
MGVNFKVLALSALATISHASPLLYPRATDSNVTYVFTNPNGLNFTQMNTTLPNVTIFATGGTIAGSSADKTATTGYKAGAVGIQTLIDAVPEMLNVANVAGVQVTNVGSPDITSDILLRLSKQINEVVCNDPTMAGAVVTHGTDTLEESAFFLDATVNCRKPVVIVGAMRPSTAISADGPLNLLQSVTVAASPKARDRGALIVMNDRIVSAFYASKTNANTVDTFKAIEMGNLGEVVSNKPYFFYPPVKPTGKTEVDIRNITSIPRVDILYSYEDMHNDTLYSAIDNGAKGIVIAGVGAGSVSTPFAAAMEDITTKHNIPIVRSTRVGNGEVPSSAESSQIASGYLNPQKARILLGLLLAQGKSIEEMRAVFERIGVA

SEQ ID NO: 71983 - protein, 378 aa, Aspergillus oryzae
MGVNFKVLALSALATISHASPLLYPRATDSNVTYVFTNPNGLNFTQMNTTLPNVTIFATGGTIAGSSADKTATTGYKAGAVGIQTLIDAVPEMLNVANVAGVQVTNVGSPDITSDILLRLSKQINEVVCNDPTMAGAVVTHGTDTLEESAFFLDATVNCRKPVVIVGAMRPSTAISADGPLNLLQSVTVAASPKARDRGALIVMNDRIVSAFYASKTNANTVDTFKAIEMGNLGEVVSNRPYFFYPPVKPTGKTEVDIRNITSIPRVDILYSYEDMHNDTLYSAIDNGAKGIVIAGSGSGSVSTPFAAAMEDITTKHNIPIVRSTRVGNGEVPSSAESSQIASGYLNPQKARILLGLLLAQGKSIEEMRAVFHRIGVA

SEQ ID NO: 71984 - protein, 378 aa, Aspergillus oryzae
MGVNFKVLALSALATISHASPLLYPRATDSNVTYVFTNPNGLNFTQMNTTLPNVTIFATGGTIAGSSADKTATTGYKAGAVGIQTLIDAVPEMLNVANVAGVQVTNVGSPDITSDILLRLSAQINEVVCNDPTMAGAVVTHGTDTLEESAFFLDATVNCRKPVVIVGAMRPSTAISADGPLNLLQSVTVAASPKARDRGALIVMNDRIVSAFYASKTNANTVDTFKAIEMGNLGEVVSNKPYFFYPPVKPTGKTEVDIVNITSIPRVDILYSYEDMHNDTLYSAIDNGAKGIVIAGSGSGSVSTPFAAAMEDITTKHNIPIVRSTRVGNGEVPSSAESSQIASGYLNPQKARILLGLLLAQGKSIEEMRAVFERIGVA

SEQ ID NO: 71985 - protein, 378 aa, Aspergillus oryzae
MGVNFKVLALSALATISHASPLLYPRATDSNVTYVFTNPNGLNFTQMNTTLPNVTIFATGGTIAGSSADKTATCGYKAGAVGIQTLIDAVPEMLNVANVAGVQVTNVGSPDITSDILLRLSKQINEVVCNDPTMAGAVVTHGTDTLEESAFFLDATVNCRKPVVIVGAMRPSTAISADGPLNLLQSVTVAASPKARDRGALIVMNDRIVSAFYASKTNANTVDTFKAIEMGNLGEVVCNKPYFFYPPVKPTGKTEVDIRNITSIPRVDILYSYEDMHNDTLYSAIDNGAKGIVIAGSGSGSVSTPFAAAMEDITTKHNIPIVRSTRVGNGEVPSSAESSQIASGYLNPQKARILLGLLLAQGKSIEEMRAVFERIGVA

SEQ ID NO: 71986 - protein, 378 aa, Aspergillus oryzae
MGVNFKVLALSALATISHASPLLYPRATDSNVTYVFTNPNGLNFTQMNTTLPNVTIFATGGTIAGSSADKTATTGYKAGAVGIQTLIDAVPEMLNVANVAGVQVTNVGSPDITSDILLRLSAQINEVVCNDPTMAGAVVTHGTDTLEESAFFLDATVNCRKPVVIVGAMRPSTAISADGPLNLLQSVTVAASPLARDRGALIVMNDRIVSAFYASKTNANTVDTFKAIEMGNLGEVVSNKPYFFYPPVKPTGKTEVDIRNITSIPRVDILYSYEDMHNDTLYSAIDNGAKGIVIAGSGSGSVSTPFAAAMEDITTKHNIPIVRSTRVGNGEVPSSAESSQIASGYLNPQKARILLGLLLAQGKSIEEMRAVFERIGVA

SEQ ID NO: 71987 - protein, 378 aa, Aspergillus oryzae
MGVNFKVLALSALATISHASPLLYPRATDSNVTYVFTNPNGLNFTQMNTTLPNVTIFATGGTIAGSSADKTATTGYKAGAVGVDTLIDAVPEMLNVANVAGVQVTNVGSPDITSDILLRLSKQINEVVCNDPTMAGAVVTHGTDTLEESAFFLDATVNCRKPVVIVGAMRPSTAISADGPLNLLQSVTVAASPKARDRGALIVMDDRIVSAFYASKTNANTVDTFKAIEMGNLGEVVSNKPYFFYPPVKPTGKTEVDIRNITSIPRVDILYSYEDMHNDTLYSAIDNGAKGIVIAGSGSGSVSTPFSAAMEDITTKHNIPIVRSTRVGNGEVPSSAESSQIASGYLNPQKARILLGLLLAQGKSIEEMRAVFERIGVA

SEQ ID NO: 71988 - protein, 378 aa, Aspergillus oryzae
MGVNFKVLALSALATISHASPLLYPRATDSNVTYVFTNPNGLNFTQMNTTLPNVTIFATGGTIAGSSADKTATTGYKAGAVGIQTLIDAVPEMLNVANVAGVQVTNVGSPDITSDILLRLSKQINEVVCNDPTMAGAVVTHGTDTLEESAFFLDATVNCRKPVVIVGAMRPSTAISADGPLNLLQSVTVAASPKARDRGALIVMNDRIVSAFYASKTNANTVDTFKAIEMGNLGEVVSNKPYFFYPPVKPTGKTEVDIRNITSIPRVDILYSYEDMHNDTLYSAIDNGAVGIVIAGSGSGSVSTPFAAAMEDITTKHNIPIVRSTRVGNGEVPSSAEWSQIASGYLNPQKARILLGLLLAQGKSIEEMRAVFERIGVA

SEQ ID NO: 71989 - protein, 361 aa, Aspergillus niger
SPLLYSRTTNETFVFTNANGLNFTQMNTTLPNVTIFATGGTIAGSDSSSTATTGYKAGAVGVLSLIDAVPSMLDVANVAGVQVANVGSPDITSDILISMSKKLNRVVCEDPTMAGAVITHGTDTLEETAFFLDATVNCGKPIVIVGAMRPSTAISADGPFNLLEAVTVAASTSARDRGAMVVMNDRIASAYYVTKTNANTMDTFKAMEMGYLGEMISNTPFFFYPPVKPTGKVAFDITNVTEIPRVDILFSYEDMHNDTLYNAISSGAQGIVIAGSGAGSVSTSFNEAIEDVINRLEIPVVASTRTGNGEVPLSDVSSDTATHIASGYLNPQKSRILLGLLLSQGKNITEIADVFALGTDA

SEQ ID NO: 71990 - protein, 361 aa, Aspergillus niger
SPLLYSRTTNETFVFTNANGLNFTQMNTTLPNVTIFATGGTIAGSHSSSTATTGYTSGTFGVLSLIDAVPSMLDVANVAGVQVVNVGSEDITSGILISMSKKLNRVVCEDPTMAGAVITHGTDTLEETAFFLDATVNCGKPIVLVGAMRPSTTISADGPFNLLEAVTVAASTSARDRGAMVVMNDRIASAYYVTKTNANTMDTFKAMEMGYLGEMISNTPFFFYPPAKPTGKVAFDITNVTEIPRVDILFSYEDMHNDTLYNAISSGAQGIVIAGAGAGGVTTSFNEAIEDVINRLEIPVVQSMRTVNGEVPLSDVSSDTATHIASGYLNPQKSRILLGLLLSQGKNITEIADMFALGTDA

SEQ ID NO: 71991 - protein, 378 aa, Aspergillus oryzae
MGVNFKVLALSALATISHASPLLYPRATDSNVTYVFTNPNGLNFTQMNTTLPNVTIFATGGTIAGSSADKTATTGYKAGAVGIQTLIDAVPEMLNVANVAGVQVTNVGSPDITSDILLRLSAQINEVVCNDPTMAGAVVTHGTDTLEESAFFLDATVNCRKPVVIVGAMRPSTAISADGPLNLLQSVTVAASPKARDRGALIVMNDRIVSAFYASKTNANTVDTFKAIEMGNLGEVVSNKEYFFYPPVKPTGKTEVDIRNITSIPRVDILYSYEDMHNDTLYSAIDNGAKGIVIAGSGSGSVSTPFAAAMEDITTKHNIPIVRSTRVGNGEVPPSAESSQIASGYLNPQKARILLGLLLAQGKSIEEMRAVFERIGVA

SEQ ID NO: 71992 - protein, 378 aa, Aspergillus oryzae
MGVNFKVLALSALATISHASPLLYPRATDSNVTYVFTNPNGLNFTQMNTTLPNVTIFATGGTIAGSSADKTATTGYKAGAVGIQTLIDAVPEMLNVANVAGVQVTNVGSPDITSDILLRLSAQINEVVCNDPTMAGAVVTHGTDTLEESAFFLDATVNCRKPVVIVGAMRPSTAISADGPLNLLQSVTVAASPKARDRGALIVMNDRIVSAFYASKTNANTVDTFKAIEMGNLGEVVSNKPYFFYPPVKPTGKTEVDIRNITSIPRVDILYSYEDMHNDTLYSAIDNGAVGIVIAGSGSGSVSTPFAAAMEDITTKHNIPIVRSTRVGNGEVPSSAEWSQIASGYLNPQKARILLGLLLAQGKSIEEMRAVFERIGVA

SEQ ID NO: 71993 - protein, 378 aa, Aspergillus oryzae
MGVNFKVLALSALATISHASPLLYPRATDSNVTYVFTNPNGLNFTQMNTTLPNVTIFATGGTIAGSSADKTATTGYKAGAVGIQTLIDAVPEMLNVANVAGVQVTNVGSPDITSDILLRLSAQINEVVCNDPTMAGAVVTHGTDTLEESAFFLDATVNCRKPVVIVGAMRPSTAISADGPLNLLQSVTVAASPKARDRGALIVMNDRIVSAFYASKTNANTVDTFKAIEMGNLGEVVSNKPYFFYPPVKPTGKTEVDIRNITSIPRVDILYSYEDMHNDTLYSAIDNGAKGIVIAGSGAGSVSTPFAAAMEDITTKHNIPIVRSTRVGNGEVPPSAESSQIASGYLNPQKARILLGLLLAQGKSIEEMRAVFERIGVA

SEQ ID NO: 71994 - protein, 378 aa, Aspergillus oryzae
MGVNFKVLALSALATISHASPLLYPRATDSNVTYVFTNPNGLNFTQMNTTLPNVTIFATGGTIAGSSADKTATTGYKAGAVGIQTLIDAVPEMLNVANVAGVQVTNVGSPDITSDILLRLSAQINEVVCNDPTMAGAVVTHGTDTLEESAFFLDATVNCRKPVVIVGAMRPSTAISADGPLNLLQSVTVAASPKARDRGALIVMNDRIVSAFYASKTNANTVDTFKAIEMGNLGEVVSNKEYFFYPPVKPTGKTEVDIRNITSIPRVDILYSYEDMHNDTLYSAIDNGAKGIVIAGSGAGSVSTPFAAAMEDITTKHNIPIVRSTRVGNGEVPSSAESSQIASGYLNPQKARILLGLLLAQGKSIEEMRAVFERIGVA

SEQ ID NO: 71995 - protein, 378 aa, Aspergillus oryzae
MGVNFKVLALSALATISHASPLLYPRATDSNVTYVFTNPNGLNFTQMNTTLPNVTIFATGGTIAGSSADKTATTGYKAGAVGIQTLIDAVPEMLNVANVAGVQVTNVGSPDITSDILLRLSKQINEVVCNDPTMAGAVVTHGTDTLEESAFFLDATVNCRKPVVIVGAMRPSTAISADGPLNLLQSVTVAASPKARERGALIVMNDRIVSAFYATKTNANTVDTFKAIEMGNLGEVVSNKPYFFYPPVKPTGKTEVDVRNITSIPRVDILYSYEDMHNDTLYSAIDNGAKGIVIAGSGSGSVSTPFAAAMEDITTKHNIPIVRSTRVGNGEVPSSAESSQIASGYLNPQKARILLGLLLAQGKSIEEMRAVFERIGVA

SEQ ID NO: 71996 - protein, 378 aa, Aspergillus oryzae
MGVNFKVLALSALATISHASPLLYPRATDSNVTYVFTNPNGLNFTQMNTTLPNVTIFATGGTIAGSSADKTATTGYKAGAVGIQTLIDAVPEMLNVANVAGVQVTNVGSPDITSDILLRLSRQINEVVCNDPTMAGAVVTHGTDTLEESAFFLDATVNCRKPVVIVGAMRPSTAISADGPLNLLQSVTVAASPLARDRGALIVMNDRIVSAFYASKTNANTVDTFKAIEMGNLGEVVSNKPYFFYPPVKPTGKTEVDIRNITSIPRVDILYSYEDMHNDTLYCAIDNGAKGIVIAGSGSGSVSTPFAAAMEDITTKHNIPIVRSTRVGNGEVPSSAESSQIASGYLNPQKARILLGLLLAQGKSIEEMRAVFERIGVA

SEQ ID NO: 71997 - protein, 378 aa, Aspergillus oryzae
MGVNFKVLALSALATISHASPLLYPRATDSNVTYVFTNPNGLNFTQMNTTLPNVTIFATGGTIAGSSADKTATTGYKAGAVGIQTLIDAVPEMLNVANVAGVQVTNVGSPDITSDILLRLSAQINEVVCNDPTMAGAVVTHGTDTLEESAFFLDATVNCRKPVVIVGAMRPSTAISADGPLNLLQSVTVAASPKARDRGALIVMNDRIVSAFYASKTNANTVDTFKAIEMGNLGEVVSNKEYFFYPPVKPTGKTEVDICNITSIPRVDILYSYEDMHNDTLYSAIDNGAKGIVIAGSGSGSVSTPFAAAMEDITTKHNIPIVRSTRVGNGEVPSSAESSQIASGYLNPQKARILLGLLLAQGKSIEEMRAVFERIGVA

SEQ ID NO: 71998 - protein, 378 aa, Aspergillus oryzae
MGVNFKVLALSALATISHASPLLYPRATDSNVTYVFTNPNGLNFTQMNTTLPNVTIFATGGTIAGSSADKTATTGYKAGAVGIQTLIDAVPEMLNVANVAGVQVTNVGSPDITSDILLRLSAQINEVVCNDPTMAGAVVTHGTDTLEESAFFLDATVNCRKPVVIVGAMRPSTAISADGPLNLLQSVTVAASPLARDRGALIVMNDRIVSAFYASKTNANTVDTFKAIEMGNLGEVVSNKPYFFYPPVKPTGKTEVDIRNITSIPRVDILYSYEDMHNDTLYCAIDNGAKGIVIAGSGSGSVSTPFAAAMEDITTKHNIPIVRSTRVGNGEVPSSAESSQIASGYLNPQKARILLGLLLAQGKSIEEMRAVFERIGVA

SEQ ID NO: 71999 - protein, 378 aa, Aspergillus oryzae
MGVNFKVLALSALATISHASPLLYPRATDSNVTYVFTNPNGLNFTQMNTTLPNVTIFATGGTIAGSSADKTATTGYKAGAVGVDTLIDAVPEMLNVANVAGDQVTNVGSPDITSDILLRLSKQINEVVCNDPTMAGAVVTHGTDTLEESAFFLDATVNCRKPVVIVGAMRPSTAISADGPLNLLQSVTVAASPKARDRGALIVMDDRIVSAFYASKTNANTVDTFKAIEMGNLGEVVSNKPYFFYPPVKPTGKTEVDIRNITSIPRVDILYSYEDMHNDTLYSAIDNGAKGIVIAGSGSGSVSTPFSAAMEDITTKHNIPIVRSTRVGNGEVPSSAESSQIASGYLNPQKARILLGLLLAQGKSIEEMRAVFERIGVA

SEQ ID NO: 72000 - protein, 378 aa, Aspergillus oryzae
MGVNFKVLALSALATISHASPLLYPRATDSNVTYVFTNPNGLNFTQMNTTLPNVTIFATGGTIAGSSADKTATTGYKAGAVGIQTLIDAVPEMLNVANVAGVQVTNVGSPDITSDILLRLSRQINEVVCNDPTMAGAVGDHGTDTLEESAFFLDATVNCRKPVVIVGAMRPSTAISADGPLNLLQSVTVAASPKARDRGALIVMNDRIVSAFYASKTNANTVDTFKAIEMGNLGEVVSNKPYFFYPPVKPTGKTEVDYRNITSIPRVDILYSYEDMHNDTLYSAIDNGAKGIVIAGSGSGSVSTPFAAAMEDITTKHNIPIVRSTRVGNGEVPSSAESSQIASGYLNPQKARILLGLLLAQGKSIEEMRAVFERIGVA

SEQ ID NO: 72001 - protein, 378 aa, Aspergillus oryzae
MGVNFKVLALSALATISHASPLLYPRATDSNVTYVFTNPNGLNFTQMNTTLPNVTIFATGGTIAGSSADKTATTGYKAGAVGIQTLIDAVPEMLNVANVAGVQVTNVGSPDITSDILLRLSAQINEVVCNDPTMAGAVVTHGTDTLEESAFFLDATVNCRKPVVIVGAMRPSTAISADGPLNLLQSVTVAASPKARDRGALIVMNDRIVSAFYASKTNANTVDTFKAIEMGNLGEVVSNKEYFFYPPVKPTGKTEVDIRNITSIPRVDILYSYEDMHNDTLYSAIDNGAKGIVIAGSGAGSVSTPFAAAMEDITTKHNIPIVRSTRVGNGEVPPSAESSQIASGYLNPQKARILLGLLLAQGKSIEEMRAVFERIGVA

SEQ ID NO: 72002 - protein, 378 aa, Aspergillus oryzae
MGVNFKVLALSALATISHASPLLYPRATDSNVTYVFTNPNGLNFTQMNTTLPNVTIFATGGTIAGSSADKTATTGYKAGAVGIQTLIDAVPEMLNVANVAGVQVTNVGSPDITSDILLRLSAQINEVVCNDPTMAGAVVTHGTDTLEESAFFLDATVNCRKPVVIVGAMRPSTAISADGPLNLLQSVTVAASPKARDRGALIVMNDRIVSAFYASKTNANTVDTFKAIEMGNLGEVVSNKEYFFYPPVKPTGKTEVDIRNITSIPRVDILYSYEDMHNDTLYSAIDNGAKGIVIAGSGAGSVSTPFAAAMEDITTKHNIPIVRSTRVGNGEVPWSAESSQIASGYLNPQKARILLGLLLAQGKSIEEMRAVFERIGVA

SEQ ID NO: 72003 - protein, 378 aa, Aspergillus oryzae
MGVNFKVLALSALATISHASPLLYPRATDSNVTYVFTNPNGLNFTQMNTTLPNVTIFATGGTIAGSSADKTATTGYKAGAVGIQTLIDAVPEMLNVANVAGVQVTNVGSPDITSDILLRLSAQINEVVCNDPTMAGAVVTHGTDTLEESAFFLDATVNCRKPVVIVGAMRPSTAISADGPLNLLQSVTVAASPKARDRGALIVMNDRIVSAFYASKTNANTVDTFKAIEMGNLGEVVSNKPYFFYPPVKPTGKTEVDIRNITSIPRVDILYSYEDMHNDTLYSAIDNGAVGIVIAGSGSGSVSTPFAAAMEDITTKHNIPIVRSTRVGNGEVPPSAEWSQIASGYLNPQKARILLGLLLAQGKSIEEMRAVFERIGVA

SEQ ID NO: 72004 - protein, 378 aa, Aspergillus oryzae
MGVNFKVLALSALATISHASPLLYPRATDSNVTYVFTNPNGLNFTQMNTTLPNVTIFATGGTIAGSSADKTATTGYKAGAVGIQTLIDAVPEMLNVANVAGVQVTNVGSPDITSDILLRLSAQINEVVCNDPTMAGAVVTHGTDTLEESAFFLDATVNCRKPVVIVGAMRPSTAISADGPLNLLQSVTVAASPKARDRGALIVMNDRIVSAFYASKTNANTVDTFKAIEMGNLGEVVSNKEYFFYPPVKPTGKTEVDIRNITSIPRVDILYSYEDMHNDTLYSAIDNGAVGIVIAGSGSGSVSTPFAAAMEDITTKHNIPIVRSTRVGNGEVPSSAEWSQIASGYLNPQKARILLGLLLAQGKSIEEMRAVFERIGVA

SEQ ID NO: 72005 - protein, 378 aa, Aspergillus oryzae
MGVNFKVLALSALATISHASPLLYPRATDSNVTYVFTNPNGLNFTQMNTTLPNVTIFATGGTIAGSSADKTATTGYKAGAVGIQTLIDAVPEMLNVANVAGVQVTNVGSPDITSDILLRLSKQINEVVCNDPTMAGAVVTHGTDTLEESAFFLDATVNCRKPVVIVGAMRPSTAISADGPLNLLQSVTVAASPKARDRGALIVMNDRIVSAFYASKTNANTVDTFKAMEMGNLGEVVSNKPYFFYPPVKPTGKTEVDIRNITSIPRVDILYSYEDMHNDTLYSAIDNGAKGIVIAGSGSGSVSTPFAAAMEDIATKHNIPIVRSTRVGNGEVLSSAESSQIASGYLNPQKARILLDLLLAQGKSIEEMRAVFERIGVA

SEQ ID NO: 72006 - protein, 378 aa, Aspergillus oryzae
MGVNFKVLALSALATISHASPLLYPRATDSNVTYVFTNPNGLNFTQMNTTLPNVTIFATGGTIAGSSADKTATTGYKAGAVGIQTLIDAVPEMLNVANVAGVQVTNVGSPDITSDILLRLSAQINEVVCNDPTMAGAVVTHGTDTLEESAFFLDATVNCRKPVVIVGAMRPSTAISADGPLNLLQSVTVAASPKARDRGALIVMNDRIVSAFYASKTNANTVDTFKAIEMGNLGEVVSNKEYFFYPPVKPTGKTEVDIRNITSIPRVDILYSYEDMHNDTLYSAIDNGAKGIVIAGSGAGSVSTPFAAAMEDITTKHNIPIVRSTRVGNGEVPPSAEWSQIASGYLNPQKARILLGLLLAQGKSIEEMRAVFERIGVA

SEQ ID NO: 72007 - protein, 378 aa, Aspergillus oryzae
MGVNFKVLALSALATISHASPLLYPRATDSNVTYVFTNPNGLNFTQMNTTLPNVTIFATGGTIAGSSADKTATTGYKAGAVGIQTLIDAVPEMLNVANVAGVQVTNVGSPDITSDILLRLSAQINEVVCNDPTMAGAVVTHGTDTLEESAFFLDATVNCRKPVVIVGAMRPSTAISADGPLNLLQSVTVAASPKARDRGALIVMNDRIVSAFYASKTNANTVDTFKAIEMGNLGEVVSNKEYFFYPPVKPTGKTEVDIRNITSIPRVDILYSYEDMHNDTLYSAIDNGAKGIVIAGSGAGSVSTPFAAAMEDITTKHNIPIVRSTRVGNGEVPWSAEWSQIASGYLNPQKARILLGLLLAQGKSIEEMRAVFERIGVA

SEQ ID NO: 72008 - protein, 378 aa, Aspergillus oryzae
MGVNFKVLALSALATISHASPLLYPRATDSNVTYVFTNPNGLNFTQMNTTLPNVTIFATGGTIAGSSADKTATTGYKAGAVGIQTLIDAVPEMLNVANVAGVQVTNVGSPDITSDILLRLSAQINEVVCNDPTMAGAVVTHGTDTLEESAFFLDATVNCRKPVVIVGAMRPSTAISADGPLNLLQSVTVAASPKARDRGALIVMNDRIVSAFYASKTNANTVDTFKAIEMGNLGEVVSNKEYFFYPPVKPTGKTEVDIRNITSIPRVDILYSYEDMHNDTLYSAIDNGAVGIVIAGSGAGSVSTPFAAAMEDITTKHNIPIVRSTRVGNGEVPSSAEWSQIASGYLNPQKARILLGLLLAQGKSIEEMRAVFERIGVA

SEQ ID NO: 72009 - protein, 378 aa, Aspergillus oryzae
MGVNFKVLALSALATISHASPLLYPRATDSNVTYVFTNPNGLNFTQMNTTLPNVTIFATGGTIAGSSADKTATTGYKAGAVGIQTLIDAVPEMLNVANVAGVQVTNVGSPDITSDILLRLSAQINEVVCNDPTMAGAVVTHGTDTLEESAFFLDATVNCRKPVVIVGAMRPSTAISADGPLNLLQSVTVAASPKARDRGALIVMNDRIVSAFYASKTNANTVDTFKAIEMGNLGEVVSNREYFFYPPVKPTGKTEVDIRNITSIPRVDILYSYEDMHNDTLYSAIDNGAKGIVIAGSGAGSVSTPFAAAMEDITTKHNIPIVRSTRVGNGEVPPSAESSQIASGYLNPQKARILLGLLLAQGKSIEEMRAVFERIGVA

SEQ ID NO: 72010 - protein, 378 aa, Aspergillus oryzae
MGVNFKVLALSALATISHASPLLYPRATDSNVTYVFTNPNGLNFTQMNTTLPNITILATGGTIAGSSADKTATTGYKAGAVGIQTLIDAVPEMLNVANVAGVQVTNVGSPDITSDILLRLSKQINEVVCNDPTMAGAVVTHGTDTLEESAFFLDATVNCRKPVVIVGAMRPSTAISADGPLNLLQSVTVAASPKARDRGALIVMDDRIVSAFYASKTNANTVDTFKAIEMGNLGEVVSNKPYFFYPPVKPTGKTEVDIRKIDSIPRVDILYSYEDMHNDTLYSAIDNGAKGIVIAGSGSGSVSTPFSAAMEDITTKHNIPIVRSSRVGNGEVPSSAESSQIASGYLNPQKARILLGLLLAQGKSIEEMRAVFERIGVA

SEQ ID NO: 72011 - protein, 378 aa, Aspergillus oryzae
MGVNFKVLALSALATISHASPLLYPRATDSNVTYVFTNPNGLNFTQMNTTLPNVTIFATGGTIAGSSADKTATTGYKAGAVGIQTLIDAVPEMLNVANVAGVQVTNVGSPDITSDILLRLSAQINEVVCNDPTMAGAVVTHGTDTLEESAFFLDATVNCRKPVVIVGAMRPSTAISADGPLNLLQSVTVAASPKARDRGALIVMNDRIVSAFYASKTNANTVDTFKAIEMGNLGEVVSNKEYFFYPPVKPTGKTEVDIRNITSIPRVDILYSYEDMHNDTLYSAIDNGAKGIVIAGSGAGSVSTPFAAAMEDITTKHNIPIVRSTRVGNGEVPPSASSSQIASGYLNPQKARILLGLLLAQGKSIEEMRAVFERIGVA

SEQ ID NO: 72012 - protein, 375 aa, Aspergillus oryzae
MGVNFKVLALSALATISHASPLLYPRSNVTYVFTNPNGLNFTQMNTTLPNVTIFATGGTIAGSSADKTATTGYKAGAVGIQTLIDAVPEMLNVANVAGVQVTNVGSPDITSDILLRLSAQINEVVCNDPTMAGAVVTHGTDTLEESAFFLDATVNCRKPVVIVGAMRPSTAISADGPLNLLQSVTVAASPKARDRGALIVMNDRIVSAFYASKTNANTVDTFKAIEMGNLGEVVSNKEYFFYPPVKPTGKTEVDIRNITSIPRVDILYSYEDMHNDTLYSAIDNGAKGIVIAGSGAGSVSTPFAAAMEDITTKHNIPIVRSTRVGNGEVPPSAEWSQIASGYLNPQKARILLGLLLAQGKSIEEMRAVFERIGVA

SEQ ID NO: 72013 - protein, 378 aa, Aspergillus oryzae
MGVNFKVLALSALATISHASPLLYPRATDSNVTYVFTNPNGLNFTQMNTTLPNVTIFATGGTIAGSSADKTATTGYKAGAVGIQTLIDAVPEMLNVANVAGVQVTNVGSPDITSDILLRLSAQINEVVCNDPTMAGAVVTHGTDTLEESAFFLDATVNCRKPVVIVGAMRPSTAISADGPLNLLQSVTVAASPKARDRGALIVMNDRIVSAFYASKTNANTVDTFKAIEMGNLGEVVSNREYFFYPPVKPTGKTEVDIRNITSIPRVDILYSYEDMHNDTLYSAIDNGAKGIVIAGSGAGSVSTPFAAAMEDITTKHNIPIVRSTRVGNGEVPPSASSSQIASGYLNPQKARILLGLLLAQGKSIEEMRAVFERIGVA

SEQ ID NO: 72014 - protein, 378 aa, Aspergillus oryzae
MGVNFKVLALSALATISHASPLLYPRATDSNVTYVFTNPNGLNFTQMNTTLPNVTIFATGGTIAGSSADKTATTGYKAGAVGIQTLIDAVPEMLNVANVAGVQVTNVGSPDITSDILLRLSAQINEVVCNDPTMAGAVVTHGTDTLEESAFFLDATVNCRKPVVIVGAMRPSTAISADGPLNLLQSVTVAASPKARDRGALIVMNDRIVSAFYASKTNANTVDTFKAIEMGNLGEVVSNREYFFYPPVKPTGRTEVDIRNITSIPRVDILYSYEDMHNDTLYSAIDNGAKGIVIAGSGAGSVSTPFAAAMEDITTKHNIPIVRSTRVGNGEVPPSAESSQIASGYLNPQKARILLGLLLAQGKSIEEMRAVFERIGVA

SEQ ID NO: 72015 - protein, 378 aa, Aspergillus oryzae
MGVNFKVLALSALATISHASPLLYPRATDSNVTYVFTNPNGLNFTQMNTTLPNVTIFATGGTIAGSSADKTATTGYKAGAVGIQTLIDAVPEMLNVANVAGVQVTNVGSPDITSDILLRLSAQINEVVCNDPTMAGAVVTHGTDTLEESAFFLDATVNCRKPVVIVGAMRPSTAISADGPLNLLQSVTVAASPKARDRGALIVMNDRIVSAFYASKTNANTVDTFKAIEMGNLGEVVSNREYFFYPPVKPTGRTEVDIRNITSIPRVDILYSYEDMHNDTLYSAIDNGAKGIVIAGSGAGSVSTPFAAAMEDITTKHNIPIVRSTRVGNGEVPPSASSSQIASGYLNPQKARILLGLLLAQGKSIEEMRAVFERIGVA

SEQ ID NO: 72016 - protein, 371 aa, Aspergillus niger
KPILLSALASLASASPLLYSRTTNETFVFTNSNGLNFTQMNTTLPNVTILATGGTIAGSSADNTATTGYTAGAIGIQTLIDAVPEMLDVANVAGVQVANVGSPDVTSSILLSMAKTLNEVVCDDPTMAGAVITHGTDTLEETAFFLDATVNCGKPIVVVGAMRPATAISADGPFNLLQAVTVAASPAARDRGALVVMNDRIVSAFYVSKTNANTMDTFKAVEMGNLGAIVSNKPYFFYPPVKPTGKTTFDVRNVTSIPRVDILYSYQDMHNDTLYDAIDNGAKGIVIAGSGAGSVSSGFSDAIEDIISTHSIPIVQSTRTGNGEVPPSDESSQIASGFLNPQKSRILLGLLLAQGKGIEEIREVFAKVGVA

SEQ ID NO: 72017 - protein, 375 aa, Aspergillus niger
KPILLSALASLASASPLLYSRATNTTYVFTNSNGLNFTQMNTTLPNVTILATGGTIAGSSADNTATTGYTAGAIGIQTLIDAVPEMLDVANVAGVQVANVGSPDVTSSILLSMAKTLNEVVCDDPTMSGAVITHGTDTLEETAFFLDATVNCGKPIVVVGAMRPATAISADGPFNLLQAVTVAASPAARDRGALVVMNDRIVSAFYASKTNANTMDTFKAVEMGNLGAIVSNKPYFYYPPVKPTGKTTVDVRNVTSIPRVDILYSYQDMQNDTLYSAIDNGAKGIVIAGSGAGSVSTGFSDAIDDIASKHSIPIVLSTRTGNGEVPTSDVSSDTATHIASGFLNPQKARILLGLLLAEGKGFKEIREVFAKVTVA

SEQ ID NO: 72018 - protein, 352 aa, Aspergillus niger
SPLLYSRTTNETFVFTNSNGLNFTQMNTTLPNVTILATGGTIAGSSADNTATTGYTAGAIGIQTLIDAVPEMLDVANVAGVQVANVGSPDVTSSILLSMAKTLNEVVCDDPTMAGAVITHGTDTLEETAFFLDATVNCGKPIVVVGAMRPATAISADGPFNLLQAVTVAASPAARDRGALVVMNDRIVSAFYVSKTNANTMDTFKAVEMGNLGAIVSNKPYFFYPPVKPTGKTTFDVRNVTSIPRVDILYSYQDMHNDTLYDAIDNGAKGIVIAGSGAGSVSSGFSDAIEDIISTHSIPIVQSTRTGNGEVPPSDESSQIASGFLNPQKSRILLGLLLAQGKGIEEIREVFA

SEQ ID NO: 72019 - protein, 361 aa, Aspergillus niger
SPLLYSRATNTTYVFTNSNGLNFTQMNTTLPNVTILATGGTIAGSSADNTATTGYTAGAIGIQTLIDAVPEMLDVANVAGVQVANVGSPDVTSSILLSMAKTLNEVVCDDPTMSGAVITHGTDTLEETAFFLDATVNCGKPIVVVGAMRPATAISADGPFNLLQAVTVAASPAARDRGALVVMNDRIVSAFYASKTNANTMDTFKAVEMGNLGAIVSNKPYFYYPPVKPTGKTTVDVRNVTSIPRVDILYSYQDMQNDTLYSAIDNGAKGIVIAGSGAGSVSTGFSDAIDDIASKHSIPIVLSTRTGNGEVPTSDVSSDTATHIASGFLNPQKARILLGLLLAEGKGFKEIREVFAKVTVA

SEQ ID NO: 72020 - protein, 293 aa, Aspergillus fumigatus
LSFKIITLAAMIAVGNASPFVYPRATSPNSTYVFTNSHGLNFTQMNTTLPNVTILATGGTIAGSSNDNTATTGYTAGAIGIQQLMDAVPEMLDVANVAGIQVANVGSPDVTSSLLLHMARTINEVVCDDPTMSGAVITHGTDTLEETAFFLDATVNCGKPIVVVGAMRPATAISADGPFNLLQAVTVAAHPTARNRGALVVMNDRIVSAYYVSKTNANTMDTFKAVEMGNLGAIISNKPYFFYPPVMPTGKTTFDVRNVASIPRVDILYSYQDMQNDTLYDAVDNGAKGIVVS

SEQ ID NO: 72021 - protein, 369 aa, Aspergillus niger
KPILLSALASLASASPLLYSRTTNETFVFTNANGLNFTQMNTTLPNVTIFATGGTIAGSDSSSTATTGYKAGAVGVLSLIDAVPSMLDVANVAGVQVANVGSPDITSDILISMSKKLNRVVCEDPTMAGAVITHGTDTLEETAFFLDATVNCGKPIVIVGAMRPSTAISADGPFNLLEAVTVAASTSARDRGAMVVMNDRIASAYYVTKTNANTMDTFKAMEMGYLGEMISNTPFFFYPPVKPTGKVAFDITNVTEIPRVDILFSYEDMHNDTLYNAISSGAQGIVIAGSGAGSVSTSFNEAIEDVINRLEIPVVASTRTGNGEVPLSDVSSDTATHIASGYLNPQKSRILLGLLLSQGKNITEIADVF

SEQ ID NO: 72022 - protein, 278 aa, Aspergillus fumigatus
SPFVYPRATSPNSTYVFTNSHGLNFTQMNTTLPNVTILATGGTIAGSSNDNTATTGYTAGAIGIQQLMDAVPEMLDVANVAGIQVANVGSPDVTSSLLLHMARTINEVVCDDPTMSGAVITHGTDTLEETAFFLDATVNCGKPIVVVGAMRPATAISADGPFNLLQAVTVAAHPTARNRGALVVMNDRIVSAYYVSKTNANTMDTFKAVEMGNLGAIISNKPYFFYPPVMPTGKTTFDVRNVASIPRVDILYSYQDMQNDTLYDAVDNGAKGIVVSPA

SEQ ID NO: 72023 - protein, 353 aa, Aspergillus oryzae
SPLLYPRATDSNVTYVFTNPNGLNFTQMNTTLPNVTIFATGGTIAGSSADKTATTGYKAGAVGIQTLIDAVPEMLNVANVAGVQVTNVGSPDITSDILLRLSKQINEVVCNDPTMAGAVVTHGTDTLEESAFFLDATVNCRKPVVIVGAMRPSTAISADGPLNLLQSVTVAASPKARDRGALIVMNDRIVSAFYASKTNANTVDTFKAIEMGNLGEVVSNKPYFFYPPVKPTGKTEVDIRNITSIPRVDILYSYEDMHNDTLYSAIDNGAKGIVIAGSGSGSVSTPFAAAMEDITTKHNIPIVRSTRVGNGEVPPSAESSQIASGYLNPQKARILLGLLLAQGKSIEEMRAVF

SEQ ID NO: 72024 - protein, 353 aa, Aspergillus oryzae
SPLLYPRATDSNVTYVFTNPNGLNFTQMNTTLPNVTIFATGGTIAGSSADKTATTGYKAGAVGIQTLIDAVPEMLNVANVAGVQVTNVGSPDITSDILLRLSKQINEVVCNDPTMAGAVVTHGTDTLEESAFFLDATVNCRKPVVIVGAMRPSTAISADGPLNLLQSVTVAASPKARDRGALIVMNDRIVSAFYASKTNANTVDTFKAIEMGNLGEVVSNKPYFFYPPVKPTGKTEVDIRNITSIPRVDILYSYEDMHNDTLYSAIDNGAKGIVIAGSGAGSVSTPFAAAMEDITTKHNIPIVRSTRVGNGEVPSSAESSQIASGYLNPQKARILLGLLLAQGKSIEEMRAVF

SEQ ID NO: 72025 - protein, 353 aa, Aspergillus oryzae
SPLLYPRATDSNVTYVFTNPNGLNFTQMNTTLPNVTIFATGGTIAGSSADKTATTGYKAGAVGIQTLIDAVPEMLNVANVAGVQVTNVGSPDITSDILLRLSAQINEVVCNDPTMAGAVVTHGTDTLEESAFFLDATVNCRKPVVIVGAMRPSTAISADGPLNLLQSVTVAASPKARDRGALIVMNDRIVSAFYASKTNANTVDTFKAIEMGNLGEVVSNKPYFFYPPVKPTGKTEVDIRNITSIPRVDILYSYEDMHNDTLYSAIDNGAKGIVIAGSGAGSVSTPFAAAMEDITTKHNIPIVRSTRVGNGEVPPSAESSQIASGYLNPQKARILLGLLLAQGKSIEEMRAVF

SEQ ID NO: 72026 - protein, 353 aa, Aspergillus oryzae
SPLLYPRATDSNVTYVFTNPNGLNFTQMNTTLPNVTIFATGGTIAGSSADKTATTGYKAGAVGIQTLIDAVPEMLNVANVAGVQVTNVGSPDITSDILLRLSKQINEVVCNDPTMAGAVVTHGTDTLEESAFFLDATVNCRKPVVIVGAMRPSTAISADGPLNLLQSVTVAASPKARDRGALIVMDDRIVSARYVTKTNANTVDTFKAIEMGNLGEVVSNKPYFFYPPVKPTGKTEVDIRNITSIPRVDILYSYEDMHNDTLYSAIDNGAKGIVIAGSGSGSVSTPFSAAMEDITTKHNIPIVASTRTGNGEVPSSAESSQIASGYLNPAKSRVLLGLLLAQGKSIEEMRAVF

SEQ ID NO: 72027 - protein, 353 aa, Aspergillus oryzae
SPLLYPRATDSNVTYVFTNPNGLNFTQMNTTLPNVTIFATGGTIAGSSADKTATTGYKAGAVGIQTLIDAVPEMLNVANVAGVQVTNVGSPDITSDILLRLSKQINEVVCNDPTMAGAVVTHGTDTLEESAFFLDATVNCRKPVVIVGAMRPSTAISADGPLNLLQSVTVAASPKARDRGALIVMNDRIVSAFYASKTNANTVDTFKAIEMGNLGEVVSNKPYFFYPPVKPTGKTEVDIRNITSIPRVDILYSYEDMHNDTLYSAIDNGAKGIVIAGVGAGSVSTPFAAAMEDITTKHNIPIVRSTRVGNGEVPSSAESSQIASGYLNPQKARILLGLLLAQGKSIEEMRAVF

SEQ ID NO: 72028 - protein, 353 aa, Aspergillus oryzae
SPLLYPRATDSNVTYVFTNPNGLNFTQMNTTLPNVTIFATGGTIAGSSADKTATTGYKAGAVGIQTLIDAVPEMLNVANVAGVQVTNVGSPDITSDILLRLSKQINEVVCNDPTMAGAVVTHGTDTLEESAFFLDATVNCRKPVVIVGAMRPSTAISADGPLNLLQSVTVAASPKARDRGALIVMNDRIVSAFYASKTNANTVDTFKAIEMGNLGEVVSNKPYFFYPPVKPTGKTEVDIRNITSIPRVDILYSYEDMHNDTLYSAIDNGAKGIVIAGSGSGSVSTPFAAAMEDITTKHNIPIVRSTRVGNGEVPWSAESSQIASGYLNPQKARILLGLLLAQGKSIEEMRAVF

SEQ ID NO: 72029 - protein, 353 aa, Aspergillus oryzae
SPLLYPRATDSNVTYVFTNPNGLNFTQMNTTLPNVTIFATGGTIAGSSADNTATTGYKAGAVGIQTLIDAVPEMLNVANVAGVQVTNVGSPDITSDILLRLSKQINEVVCNDPTMAGAVVTHGTDTLEESAFFLDATVNCRKPVVIVGAMRPSTAISADGPLNLLQSVTVAASPKARDRGALIVMNDRIVSAFYASKTNANTVDTFKAIEMGNLGEVVSNKPYFFYPPVKPTGKTEVDIRNITSIPRVDILYSYEDMHNDTLYSAIDNGAKGIVIAGSGSGSVSTPFSAAMEDITTKHNIPIVASTRTGNGEVPSSAESSQIASGYLNPAKSRVLLGLLLAQGKSIEEMRAVF

SEQ ID NO: 72030 - protein, 355 aa, Aspergillus niger
SPLLYSRTTNETFVFTNANGLNFTQMNTTLPNVTIFATGGTIAGSDSSSTATTGYTSGAVGVLSLIDAVPSMLDVANVAGVQVANVGSEDITSDILISMSKKLNRVVCEDPTMAGAVITHGTDTLEETAFFLDATVNCGKPIVIVGAMRPSTAISADGPFNLLEAVTVAASTSARDRGAMVVMNDRIASAYYVTKTNANTMDTFKAMEMGYLGEMISNTPFFFYPPVKPTGKVAFDITNVTEIPRVDILFSYEDMHNDTLYNAISSGAQGIVIAGAGAGGVTTSFNEAIEDVINRLEIPVVQSMRTVNGEVPLSDVSSDTATHIASGYLNPQKSRILLGLLLSQGKNITEIADVF

SEQ ID NO: 72031 - protein, 353 aa, Aspergillus oryzae
SPLLYPRATDSNVTYVFTNPNGLNFTQMNTTLPNVTIFATGGTIAGSSADKTATTGYKAGAVGIQTLIDAVPEMLNVANVAGVQVTNVGSPDITSDILLRLSAQINEVVCNDPTMAGAVVTHGTDTLEESAFFLDATVNCRKPVVIVGAMRPSTAISADGPLNLLQSVTVAASPKARDRGALIVMNDRIVSAFYASKTNANTVDTFKAIEMGNLGEVVSNKEYFFYPPVKPTGKTEVDIRNITSIPRVDILYSYEDMHNDTLYSAIDNGAKGIVIAGSGAGSVSTPFAAAMEDITTKHNIPIVRSTRVGNGEVPPSASSSQIASGYLNPQKARILLGLLLAQGKSIEEMRAVF

SEQ ID NO: 72032 - protein, 353 aa, Aspergillus oryzae
SPLLYPRATDSNVTYVFTNPNGLNFTQMNTTLPNVTIFATGGTIAGSSADKTATTGYKAGAVGIQTLIDAVPEMLNVANVAGVQVTNVGSPDITSDILLRLSKQINEVVCNDPTMAGAVVTHGTDTLEESAFFLDATVNCRKPVVIVGAMRPSTAISADGPLNLLQSVTVAASPKARDRGALIVMNDRIVSAFYASKTNANTVDTFKAIEMGNLGEVVSNKPYFFYPPVKPTGKTEVDIRNITSIPRVDILYSYEDMHNDTLYSAIDNGAKGIVIAGSGSGSVSTPFAAAMEDITTKHNIPIVRSTRVGNGEVPSSAEWSQIASGYLNPQKARILLGLLLAQGKSIEEMRAVF

SEQ ID NO: 72033 - protein, 353 aa, Aspergillus oryzae
SPLLYPRATDSNVTYVFTNPNGLNFTQMNTTLPNVTIFATGGTIAGSSADRTATTGYKAGAVGIQTLIDAVPEMLNVANVAGVQVTNVGSPDITSDILLRLSKQINEVVCNDPTMAGAVVTHGTDTLEESAFFLDATVNCRKPVVIVGAMRPSTAISADGPLNLLQSVTVAASPKARDRGALIVMNDRIVSAFYASKTNANTVDTFKAIEMGNLGEVVSNKPYFFYPPVKPTGKTEVDIRNITSIPRVDILYSYEDMHNDTLYSAIDNGAKGIVIAGSGSGSVSTPFAAAMEDITTKHNIPIVRSTRVGNGEVPSSAESSQIASGYLNPQKARILLGLLLAQGKSIEEMRAVF

SEQ ID NO: 72034 - protein, 354 aa, Aspergillus oryzae
SPLLYPRATDSNVTYVFTNPNGLNFTQMNTTLPNVTIFATGGTIAGSSADKTATTGYKAGAVGIQTLIDAVPEMLNVANVAGVQVTNVGSPDITSDILLRLSRKQINEVVCNDPTMAGAVVTHGTDTLEESAFFLDATVNCRKPVVIVGAMRPSTAISADGPLNLLQSVTVAASPKARDRGALIVMNDRIVSAFYASKTNANTVDTFKAIEMGNLGEVVSNKPYFFYPPVKPTGKTEVDIRNITSIPRVDILYSYEDMHNDTLYSAIDNGAKGIVIAGSGSGSVSTPFAAAMEDITTKHNIPIVRSTRVGNGEVPSSAESSQIASGYLNPQKARILLGLLLAQGKSIEEMRAVF

SEQ ID NO: 72035 - protein, 353 aa, Aspergillus oryzae
SPLLYPRATDSNVTYVFTNPNGLNFTQMNTTLPNVTIFATGGTIAGSSADRTATTGYKAGAVGIQTLIDAVPEMLNVANVAGVQVTNVGSPDITSDILLRLSKQINEVVCNDPTMAGAVVTHGTDTLEESAFFLDATVNCRKPVVIVGAMRPSTAISADGPLNLLQSVTVAASPKARDRGALIVMNDRIVSAFYASKTNANTVDTFKAIEMGNLGEVVSNKPYFFYPPVKPTGKTEVDIRNITSIPRVDILYSYEDMHNDTLYSAIDNGAKGIVIAGSGSGSVSTPFAAAMEDITTKHNIPIVRSTRVGNGEVPSSAEWSQIASGYLNPQKARILLGLLLAQGKSIEEMRAVF

SEQ ID NO: 72036 - protein, 353 aa, Aspergillus oryzae
SPLLYPRATDSNVTYVFTNPNGLNFTQMNTTLPNVTIFATGGTIAGSSADKTATTGYKAGAVGIQTLIDAVPEMLNVANVAGVQVTNVGSPDITSDILLRLSKQINEVVCNDPTMAGAVVTHGTDTLEESAFFLDATVNCRKPVVIVGAMRPSTAISADGPLNLLQSVTVAASPKARDRGALIVMNDRIVSAFYASKTNANTVDTFKAIEMGNLGEVVSNRPYFFYPPVKPTGKTEVDIRNITSIPRVDILYSYEDMHNDTLYSAIDNGAKGIVIAGSGSGSVSTPFAAAMEDITTKHNIPIVRSTRVGNGEVPSSAESSQIASGYLNPQKARILLGLLLAQGKSIEEMRAVF

SEQ ID NO: 72037 - protein, 353 aa, Aspergillus oryzae
SPLLYPRATDSNVTYVFTNPNGLNFTQMNTTLPNVTIFATGGTIAGSSADKTATTGYKAGAVGIQTLIDAVPEMLNVANVAGVQVTNVGSPDITSDILLRLSAQINEVVCNDPTMAGAVVTHGTDTLEESAFFLDATVNCRKPVVIVGAMRPSTAISADGPLNLLQSVTVAASPKARDRGALIVMNDRIVSAFYASKTNANTVDTFKAIEMGNLGEVVSNKEYFFYPPVKPTGKTEVDIRNITSIPRVDILYSYEDMHNDTLYSAIDNGAKGIVIAGSGAGSVSTPFAAAMEDITTKHNIPIVRSTRVGNGEVPPSAESSQIASGYLNPQKARILLGLLLAQGKSIEEMRAVF

SEQ ID NO: 72038 - protein, 353 aa, Aspergillus oryzae
SPLLYPRATDSNVTYVFTNPNGLNFTQMNTTLPNVTIFATGGTIAGSSADKTATTGYKAGAVGIQTLIDAVPEMLNVANVAGVQVTNVGSPDITSDILLRLSKQINEVVCNDPTMAGAVVTHGTDTLEESAFFLDATVNCRKPVVIVGAMRPSTAISADGPLNLLQSVTVAASPLARDRGALIVMNDRIVSAFYASKTNANTVDTFKAIEMGNLGEVVSNKPYFFYPPVKPTGKTEVDIRNITSIPRVDILYSYEDMHNDTLYSAIDNGAKGIVIAGSGSGSVSTPFAAAMEDITTKHNIPIVRSTRVGNGEVPSSAESSQIASGYLNPQKARILLGLLLAQGKSIEEMRAVF

SEQ ID NO: 72039 - protein, 353 aa, Aspergillus oryzae
SPLLYPRATDSNVTYVFTNPNGLNFTQMNTTLPNVTIFATGGTIAGSSADKTATTGYKAGAVGIQTLIDAVPEMLNVANVAGVQVTNVGSPDITSDILLRLSAQINEVVCNDPTMAGAVVTHGTDTLEESAFFLDATVNCRKPVVIVGAMRPSTAISADGPLNLLQSVTVAASPKARDRGALIVMNDRIVSAFYASKTNANTVDTFKAIEMGNLGEVVSNREYFFYPPVKPTGKTEVDIRNITSIPRVDILYSYEDMHNDTLYSAIDNGAKGIVIAGSGAGSVSTPFAAAMEDITTKHNIPIVRSTRVGNGEVPPSAESSQIASGYLNPQKARILLGLLLAQGKSIEEMRAVF

SEQ ID NO: 72040 - protein, 353 aa, Aspergillus oryzae
SPLLYPRATDSNVTYVFTNPNGLNFTQMNTTLPNVTIFATGGTIAGSSADKTATTGYKAGAVGIQTLIDAVPEMLNVANVAGVQVTNVGSPDITSDILLRLSKQINEVVCNDPTMAGAVVTHGTDTLEESAFFLDATVNCRKPVVIVGAMRPSTAISADGPLNLLQSVTVAASPKARDRGALIVMNDRIVSAFYASKTNANTVDTFKAIEMGNLGEVVSNKPYFFYPPVKPTGKTEVDIRNITSIPRVDILYSYEDMHNDTLYSAIDNGAKGIVIAGSGSGSVSTPFSAAMEDITTKHNIPIVRSTRVGNGEVPSSAESSQIASGYLNPQKARILLGLLLAQGKSIEEMRAVF

SEQ ID NO: 72041 - protein, 353 aa, Aspergillus oryzae
SPLLYPRATDSNVTYVFTNPNGLNFTQMNTTLPNVTIFATGGTIAGSSADKTATTGYKAGAVGIQTLIDAVPEMLNVANVAGVQVTNVGSPDITSDILLRLSKQINEVVCNDPTMAGAVVTHGTDTLEESAFFLDATVNCRKPVVIVGAMRPSTAISADGPLNLLQSVTVAASPLARDRGALIVMNDRIVSAFYASKTNANTVDTFKAIEMGNLGEVVSNKPYFFYPPVKPTGKTEVDIRNITSIPRVDILYSYEDMHNDTLYCAIDNGAKGIVIAGSGSGSVSTPFAAAMEDITTKHNIPIVRSTRVGNGEVPSSAESSQIASGYLNPQKARILLGLLLAQGKSIEEMRAVF

SEQ ID NO: 72042 - protein, 353 aa, Aspergillus oryzae
SPLLYPRATDSNVTYVFTNPNGLNFTQMNTTLPNVTIFATGGTIAGSSADKTATTGYKAGAVGVDTLIDAVPEMLNVANVAGVQVTNVGSPDITSDILLRLSKQINEVVCNDPTMAGAVVTHGTDTLEESAFFLDATVNCRKPVVIVGAMRPSTAISADGPLNLLQSVTVAASPKARDRGALIVMDDRIVSAFYASKTNANTVDTFKAIEMGNLGEVVSNKPYFFYPPVKPTGKTEVDIRNITSIPRVDILYSYEDMHNDTLYSAIDNGAKGIVIAGSGSGSVSTPFSAAMEDITTKHNIPIVRSTRVGNGEVPSSAESSQIASGYLNPQKARILLGLLLAQGKSIEEMRAVF

SEQ ID NO: 72043 - protein, 353 aa, Aspergillus oryzae
SPLLYPRATDSNVTYVFTNPNGLNFTQMNTTLPNVTIFATGGTIAGSSADNTATTGYKAGAVGIQTLIDAVPEMLNVANVAGVQVTNVGSPDITSDILLRLSKQINEVVCNDPTMAGAVVTHGTDTLEESAFFLDATVNCRKPVVIVGAMRPSTAISADGPLNLLQSVTVAASPKARDRGALIVMNDRIVSAFYASKTNANTVDTFKAIEMGNLGEVVSNKPYFFYPPVKPTGKTEVDIRNITSIPRVDILYSYEDMHNDTLYSAIDNGAVGIVIAGSGSGSVSTPFAAAMEDITTKHNIPIVRSTRVGNGEVPSSAESSQIASGYLNPQKARILLGLLLAQGKSIEEMRAVF

SEQ ID NO: 72044 - protein, 353 aa, Aspergillus oryzae
SPLLYPRATDSNVTYVFTNPNGLNFTQMNTTLPNVTIFATGGTIAGSSADKTATTGYKAGAVGIQTLIDAVPEMLNVANVAGVQVTNVGSPDITSDILLRLSKQINEVVCNDPTMAGAVVTHGTDTLEESAFFLDATVNCRKPVVIVGAMRPSTAISADGPLNLLQSVTVAASPKARDRGALIVMDDRIVSAFYASKTNANTVDTFKAIEMGNLGEVVSNKPYFFYPPVKPTGKTEVDIRNITSIPRVDILYSYEDMHNDTLYSAIDNGAKGIVIAGSGSGSVSTPFSAAMEDITTKHNIPIVASTRTGNGEVPSSAESSQIASGYLNPQKARILLGLLLAQGKSIEEMRAVF

SEQ ID NO: 72045 - protein, 353 aa, Aspergillus oryzae
SPLLYPRATDSNVTYVFTNPNGLNFTQMNTTLPNVTIFATGGTIAGSSADKTATTGYKAGAVGIQTLIDAVPEMLNVANVAGVQVTNVGSPDITSDILLRLSKQINEVVCNDPTMAGAVVTHGTDTLEESAFFLDATVNCRKPVVIVGAMRPSTAISADGPLNLLQSVTVAASPKARDRGALIVMNDRIVSAFYASKTNANTVDTFKAIEMGNLGEVVSNKPYFFYPPVKPTGKTEVDIRNITSIPRVDILYSYEDMHNDTLYSAIDNGAVGIVIAGSGSGSVSTPFAAAMEDITTKHNIPIVRSTRVGNGEVPSSAEWSQIASGYLNPQKARILLGLLLAQGKSIEEMRAVF

SEQ ID NO: 72046 - protein, 353 aa, Aspergillus oryzae
SPLLYPRATDSNVTYVFTNPNGLNFTQMNTTLPNVTIFATGGTIAGSSADKTATTGYKAGAVGIQTLIDAVPEMLNVANVAGVQVTNVGSPDITSDILLRLSAQINEVVCNDPTMAGAVVTHGTDTLEESAFFLDATVNCRKPVVIVGAMRPSTAISADGPLNLLQSVTVAASPKARDRGALIVMNDRIVSAFYASKTNANTVDTFKAIEMGNLGEVVSNREYFFYPPVKPTGKTEVDIRNITSIPRVDILYSYEDMHNDTLYSAIDNGAKGIVIAGSGAGSVSTPFAAAMEDITTKHNIPIVRSTRVGNGEVPPSASSSQIASGYLNPQKARILLGLLLAQGKSIEEMRAVF

SEQ ID NO: 72047 - protein, 353 aa, Aspergillus oryzae
SPLLYPRATDSNVTYVFTNPNGLNFTQMNTTLPNVTIFATGGTIAGSSADKTATTGYKAGAVGIQTLIDAVPEMLNVANVAGVQVTNVGSPDITSDILLRLSKQINEVVCNDPTMAGAVVTHGTDTLEESAFFLDATVNCRKPVVIVGAMRPSTAISADGPLNLLQSVTVAASPKARDRGALIVMNDRIVSAFYASKTNANTVDTFKAIEMGNLGEVVSNKPYFFYPPVKPTGKTEVDIRNITSIPRVDILYSYEDMHNDTLYSAIDNGAKGIVIAGSGSGSVSTPFAAAMEDITTKHNIPIVRSTRVGNGEVPSSASSSQIASGYLNPQKARILLGLLLAQGKSIEEMRAVF

SEQ ID NO: 72048 - protein, 353 aa, Aspergillus oryzae
SPLLYPRATDSNVTYVFTNPNGLNFTQMNTTLPNVTIFATGGTIAGSSADKTATTGYKAGAVGIQTLIDAVPEMLNVANVAGVQVTNVGSPDITSDILLRLSKQINEVVCNDPTMAGAVVTHGTDTLEESAFFLDATVNCRKPVVIVGAMRPSTAISADGPLNLLQSVTVAASPKARDRGALIVMNDRIVSAFYASKTNANTVDTFKAIEMGNLGEVVSNKPYFFYPPVKPTGKTEVDIRNITSIPRVDILYSYEDMHNDTLYSAIDNGAVGIVIAGSGSGSVSTPFAAAMEDITTKHNIPIVRSTRVGNGEVPSSAESSQIASGYLNPQKARILLGLLLAQGKSIEEMRAVF

SEQ ID NO: 72049 - protein, 353 aa, Aspergillus oryzae
SPLLYPRATDSNVTYVFTNPNGLNFTQMNTTLPNVTIFATGGTIAGSSADKTATTGYKAGAVGIQTLIDAVPEMLNVANVAGVQVTNVGSPDITSDILLRLSKQINEVVCNDPTMAGAVVTHGTDTLEESAFFLDATVNCRKPVVIVGAMRPSTAISADGPLNLLQSVTVAASPKARDRGALIVMNDRIVSAFYASKTNANTVDTFKAIEMGNLGEVVSNKPYFFYPPVKPTGKTEVDIRNITSIPRVDILYSYEDMHNDTLYSAIDNGAKGIVIAGSGSGSVSTPFAAAMEDITTKHNIPIVRSTRVGNGEVPSSAESSQIASGYLNPQKARILLGLLLAQGKSIEEMRAVF

SEQ ID NO: 72050 - protein, 353 aa, Aspergillus oryzae
SPLLYPRATDSNVTYVFTNPNGLNFTQMNTTLPNVTIFATGGTIAGSSADKTATTGYKAGAVGIQTLIDAVPEMLNVANVAGVQVTNVGSPDITSDILLRLSKQINEVVCNDPTMAGAVVTHGTDTLEESAFFLDATVNCRKPVVIVGAMRPSTAISADGPLNLLQSVTVAASPKARDRGALIVMNDRIVSAFYASKTNANTVDTFKAIEMGNLGEVVSNKPYFFYPPVKPTGKTEVDIRNITSIPRVDILYSYEDMHNDTLYCAIDNGAKGIVIAGSGSGSVSTPFAAAMEDITTKHNIPIVRSTRVGNGEVPSSAESSQIASGYLNPQKARILLGLLLAQGKSIEEMRAVF

SEQ ID NO: 72051 - protein, 353 aa, Aspergillus oryzae
SPLLYPRATDSNVTYVFTNPNGLNFTQMNTTLPNVTIFATGGTIAGSSADNTATTGYKAGAVGIQTLIDAVPEMLNVANVAGVQVTNVGSPDITSDILLRLSKQINEVVCNDPTMAGAVVTHGTDTLEESAFFLDATVNCRKPVVIVGAMRPSTAISADGPLNLLQSVTVAASPKARDRGALIVMNDRIVSAFYASKTNANTVDTFKAIEMGNLGEVVSNKPYFFYPPVKPTGKTEVDIRNITSIPRVDILYSYEDMHNDTLYSAIDNGAKGIVIAGSGSGSVSTPFAAAMEDITTKHNIPIVRSTRVGNGEVPSSAESSQIASGYLNPQKARILLGLLLAQGKSIEEMRAVF

SEQ ID NO: 72052 - protein, 353 aa, Aspergillus oryzae
SPLLYPRATDSNVTYVFTNPNGLNFTQMNTTLPNVTIFATGGTIAGSSADKTATTGYKAGAVGIQTLIDAVPEMLNVANVAGVQVTNVGSPDITSDILLRLSAQINEVVCNDPTMAGAVVTHGTDTLEESAFFLDATVNCRKPVVIVGAMRPSTAISADGPLNLLQSVTVAASPKARDRGALIVMNDRIVSAFYASKTNANTVDTFKAIEMGNLGEVVSNKEYFFYPPVKPTGKTEVDIRNITSIPRVDILYSYEDMHNDTLYSAIDNGAKGIVIAGSGAGSVSTPFAAAMEDITTKHNIPIVRSTRVGNGEVPWSAESSQIASGYLNPQKARILLGLLLAQGKSIEEMRAVF

SEQ ID NO: 72053 - protein, 350 aa, Aspergillus oryzae
SPLLYPRSNVTYVFTNPNGLNFTQMNTTLPNVTIFATGGTIAGSSADKTATTGYKAGAVGIQTLIDAVPEMLNVANVAGVQVTNVGSPDITSDILLRLSKQINEVVCNDPTMAGAVVTHGTDTLEESAFFLDATVNCRKPVVIVGAMRPSTAISADGPLNLLQSVTVAASPKARDRGALIVMNDRIVSAFYASKTNANTVDTFKAIEMGNLGEVVSNKPYFFYPPVKPTGKTEVDIRNITSIPRVDILYSYEDMHNDTLYSAIDNGAKGIVIAGSGSGSVSTPFAAAMEDITTKHNIPIVRSTRVGNGEVPSSAESSQIASGYLNPQKARILLGLLLAQGKSIEEMRAVF

SEQ ID NO: 72054 - protein, 369 aa, Aspergillus niger
KPILLSALASLASASPLLYSRTTNETFVFTNANGLNFTQMNTTLPNVTIFATGGTIAGSDSSSTATTGYKAGAVGVLSLIDAVPSMLDVANVAGVQVANVGSEDITSDILISMSKKLNRVVCEDPTMAGAVITHGTDTLEETAFFLDATVNCGKPIVIVGAMRPSTAISADGPFNLLEAVTVAASTSARDRGAMVVMNDRIASAYYVTKTNANTMDTFKAMEMGYLGEMISNTPFFFYPPVKPTGKVAFDITNVTEIPRVDILFSYEDMHNDTLYNAISSGAQGIVIAGSGAGGVTTSFNEAIEDVINRLEIPVVQSMRTVNGEVPLSDVSSDTATHIASGYLNPQKSRILLGLLLSQGKNITEIADVF

SEQ ID NO: 72055 - protein, 375 aa, Aspergillus terreus
MGFNIKALTVAALAALGHASPLYSRADANVTYVFTNAHGLNFTQMNTTLPNVTILATGGTIAGSSADNTATTGYKAGAIGIQQLIDAVPEMLNVANVAGVQVTNVGSPDVTSHILLDMVRMLDELVCQDETMAGAVITHGTDTLEETAFFLDATMPCRKPVVVVGAMRPSTAISADGPFNLLQSVTVAATPAARDRGALVVLNDRVLSAFYTSKTNANTMDTFKAIEMGALAAIVSNKPYFYYPPVRPTGHEFFDVRNVSALPRVDILYSYQDMQNDTLYDAAKNGAKGIVIAGSGAGSVSSGFSAAIEDVMDTYHIPVVASTRTGNGEVPPSDDGAIGSGFLNPQKSRIWLELLLMQKKTVAEVREMFAKVAVA

SEQ ID NO: 72056 - protein, 353 aa, Aspergillus oryzae
SPLLYPRATDSNVTYVFTNPNGLNFTQMNTTLPNVTIFATGGTIAGSSADKTATTGYKAGAVGIQTLIDAVPEMLNVANVAGVQVTNVGSPDITSDILLRLSKQINEVVCNDPTMAGAVVTHGTDTLEESAFFLDATVNCRKPVVIVGAMRPSTAISADGPLNLLQSVTVAASPKARDRGALIVMDDRIVSAFYASKTNANTVDTFKAIEMGNLGEVVSNKPYFFYPPVKPTGKTEVDIRNITSIPRVDILYSYEDMHNDTLYSAIDNGAKGIVIAGSGSGSVSTPFSAAMEDITTKHGIVVVASTRTGNGEVPSSAESSQIASGYLNPAKSRVLLGLLLAQGKSIEEMRAVF

SEQ ID NO: 72057 - protein, 353 aa, Aspergillus oryzae
SPLLYPRATDSNVTYVFTNPNGLNFTQMNTTLPNVTIFATGGTIAGSSADKTATTGYKAGAVGIQTLIDAVPEMLNVANVAGVQVTNVGSPDITSDILLRLSKQINEVVCNDPTMAGAVVTHGTDTLEESAFFLDATVNCRKPVVIVGAMRPSTAISADGPLNLLQSVTVAASPKARDRGALIVMDDRIVSAFYASKTNANTVDTFKAIEMGNLGEVVSNKPYFFYPPVKPTGKTEVDIRNITSIPRVDILYSYEDMHNDTLYSAIDNGAKGIVIAGSGSGSVSTPFSAAMEDITTKHNIPIVRSTRVGNGEVPSSAESSQIASGYLNPQKARILLGLLLAQGKSIEEMRAVF

SEQ ID NO: 72058 - protein, 353 aa, Aspergillus oryzae
SPLLYPRATDSNVTYVFTNPNGLNFTQMNTTLPNVTIFATGGTIAGSSADKTATTGYKAGAVGIQTLIDAVPEMLNVANVAGVQVTNVGSPDITSDILLRLSKQINEVVCNDPTMAGAVVTHGTDTLEESAFFLDATVNCRKPVVIVGAMRPSTAISADGPLNLLQSVTVAASPKARDRGALIVMDDRIVSAFYASKTNANTVDTFKAIEMGNLGEVVSNKPYFFYPPVKPTGKTEVDIRNITSIPRVDILYSYEDMHNDTLYSAIDNGAKGIVIAGSGNGSVSTPFSAAMEDITTKHNIPIVASTRTGNGEVPSSAESSQIASGYLNPAKSRVLLGLLLAQGKSIEEMRAVF

SEQ ID NO: 72059 - protein, 353 aa, Aspergillus oryzae
SPLLYPRATDSNVTYVFTNPNGLNFTQMNTTLPNVTIFATGGTIAGSSADKTATAGYKAGAVGIQTLIDAVPEMLNVANVAGVQVTNVGSPDITSDILLRLSKQINEVVCNDPTMAGAVVTHGTDTLEESAFFLDATVNCRKPVVIVGAMRPSTAISADGPLNLLQSVTVAASPKARDRGALIVMNDRIVSAFYASKTNANTVDTFKAIEMGNLGEVVSNKPYFFYPPVKPTGKTEVDIRNITSIPRVDILYSYEDMHNDTLYSAIDNGAKGIVIAGSGSGSVSTPFAAAMEDITTKHNIPIVRSTRVGNGEVPSSAESSQIASGYLNPQKARILLGLLLAQGKSIEEMRAVF

SEQ ID NO: 72060 - protein, 353 aa, Aspergillus oryzae
SPLLYPRATDSNVTYVFTNPNGLNFTQMNTTLPNVTIFATGGTIAGSSADKTATTGYKAGAVGIQTLIDAVPEMLNVANVAGVQVTNVGSPDITSDILLRLSAQINEVVCNDPTMAGAVVTHGTDTLEESAFFLDATVNCRKPVVIVGAMRPSTAISADGPLNLLQSVTVAASPLARDRGALIVMNDRIVSAFYASKTNANTVDTFKAIEMGNLGEVVSNKPYFFYPPVKPTGKTEVDIRNITSIPRVDILYSYEDMHNDTLYCAIDNGAKGIVIAGSGSGSVSTPFAAAMEDITTKHNIPIVRSTRVGNGEVPSSAESSQIASGYLNPQKARILLGLLLAQGKSIEEMRAVF

SEQ ID NO: 72061 - protein, 353 aa, Aspergillus oryzae
SPLLYPRATDSNVTYVFTNPNGLNFTQMNTTLPNVTIFATGGTIAGSSADKTATTGYKAGAVGIQTLIDAVPEMLNVANVAGVQVTNVGSPDITSDILLRLSAQINEVVCNDPTMAGAVVTHGTDTLEESAFFLDATVNCRKPVVIVGAMRPSTAISADGPLNLLQSVTVAASPKARDRGALIVMNDRIVSAFYASKTNANTVDTFKAIEMGNLGEVVSNKEYFFYPPVKPTGKTEVDIRNITSIPRVDILYSYEDMHNDTLYSAIDNGAKGIVIAGSGAGSVSTPFAAAMEDITTKHNIPIVRSTRVGNGEVPSSAESSQIASGYLNPQKARILLGLLLAQGKSIEEMRAVF

SEQ ID NO: 72062 - protein, 353 aa, Aspergillus oryzae
SPLLYPRATDSNVTYVFTNPNGLNFTQMNTTLPNVTIFATGGTIAGSSADKTATTGYKAGAVGIQTLIDAVPEMLNVANVAGVQVTNVGSPDITSDILLRLSAQINEVVCNDPTMAGAVVTHGTDTLEESAFFLDATVNCRKPVVIVGAMRPSTAISADGPLNLLQSVTVAASPKARDRGALIVMNDRIVSAFYASKTNANTVDTFKAIEMGNLGEVVSNKPYFFYPPVKPTGKTEVDIRNITSIPRVDILYSYEDMHNDTLYSAIDNGAKGIVIAGSGSGSVSTPFAAAMEDITTKHNIPIVRSTRVGNGEVPSSAESSQIASGYLNPQKARILLGLLLAQGKSIEEMRAVF

SEQ ID NO: 72063 - protein, 353 aa, Aspergillus oryzae
SPLLYPRATDSNVTYVFTNPNGLNFTQMNTTLPNVTIFATGGTIAGSSADKTATTGYKAGAVGIQTLIDAVPEMLNVANVAGVQVTNVGSPDITSDILLRLSAQINEVVCNDPTMAGAVVTHGTDTLEESAFFLDATVNCRKPVVIVGAMRPSTAISADGPLNLLQSVTVAASPKARDRGALIVMNDRIVSAFYASKTNANTVDTFKAIEMGNLGEVVSNKEYFFYPPVKPTGKTEVDIRNITSIPRVDILYSYEDMHNDTLYSAIDNGAVGIVIAGSGAGSVSTPFAAAMEDITTKHNIPIVRSTRVGNGEVPSSAEWSQIASGYLNPQKARILLGLLLAQGKSIEEMRAVF

SEQ ID NO: 72064 - protein, 353 aa, Aspergillus oryzae
SPLLYPRATDSNVTYVFTNPNGLNFTQMNTTLPNVTIFATGGTIAGSSADKTATTGYKAGAVGIQTLIDAVPEMLNVANVAGVQVTNVGSPDITSDILLRLSKQINEVVCNDPTMAGAVVTHGTDTLEESAFFLDATVNCRKPVVIVGAMRPSTAISADGPLNLLQSVTVAASPKARDRGALIVMNDRIVSAFYASKTNANTVDTFKAIEMGNLGEVVSNKEYFFYPPVKPTGKTEVDIRNITSIPRVDILYSYEDMHNDTLYSAIDNGAKGIVIAGSGSGSVSTPFAAAMEDITTKHNIPIVRSTRVGNGEVPSSAESSQIASGYLNPQKARILLGLLLAQGKSIEEMRAVF

SEQ ID NO: 72065 - protein, 353 aa, Aspergillus oryzae
SPLLYPRATDSNVTYVFTNPNGLNFTQMNTTLPNVTIFATGGTIAGSSADKTATTGYKAGAVGIQTLIDAVPEMLNVANVAGVQVTNVGSPDITSDILLRLSKQINEVVCNDPTMAGAVVTHGTDTLEESAFFLDATVNCRKPVVIVGAMRPSTAISADGPLNLLQSVTVAASPKARDRGALIVMNDRIVSAFYASKTNANTVDTFKAMEMGNLGEVVSNKPYFFYPPVKPTGKTEVDIRNITSIPRVDILYSYEDMHNDTLYSAIDNGAKGIVIAGSGSGSVSTPFAAAMEDIATKHNIPIVRSTRVGNGEVLSSAESSQIASGYLNPQKARILLDLLLAQGKSIEEMRAVF

SEQ ID NO: 72066 - protein, 353 aa, Aspergillus oryzae
SPLLYPRATDSNVTYVFTNPNGLNFTQMNTTLPNVTIFATGGTIAGSSADKTATTGYKAGAVGIQTLIDAVPEMLNVANVAGVQVTNVGSPDITSDILLRLSKQINEVVCNDPTMAGAVVTHGTDTLEESAFFLDATVNCRKPVVIVGAMRPSTAISADGPLNLLQSVTVAASPKARDRGALIVMNDRIVSAFYASKTNANTVDTFKAIEMGNLGEVVSNKPYFFYPPVLPTGKTEVDIRNITSIPRVDILYSYEDMHNDTLYSAIDNGAKGIVIAGSGSGSVSTPFAAAMEDITTKHNIPIVRSTRVGNGEVPSSAESSQIASGYLNPQKARILLGLLLAQGKSIEEMRAVF

SEQ ID NO: 72067 - protein, 353 aa, Aspergillus oryzae
SPLLYPRATDSNVTYVFTNPNGLNFTQMNTTLPNVTIFATGGTIAGSSADKTATTGYKAGAVGIQTLIDAVPEMLNVANVAGVQVTNVGSPDITSDILLRLSAQINEVVCNDPTMAGAVVTHGTDTLEESAFFLDATVNCRKPVVIVGAMRPSTAISADGPLNLLQSVTVAASPKARDRGALIVMNDRIVSAFYASKTNANTVDTFKAIEMGNLGEVVSNREYFFYPPVKPTGRTEVDIRNITSIPRVDILYSYEDMHNDTLYSAIDNGAKGIVIAGSGAGSVSTPFAAAMEDITTKHNIPIVRSTRVGNGEVPPSASSSQIASGYLNPQKARILLGLLLAQGKSIEEMRAVF

SEQ ID NO: 72068 - protein, 353 aa, Aspergillus oryzae
SPLLYPRATDSNVTYVFTNPNGLNFTQMNTTLPNVTIFATGGTIAGSSADKTATTGYKAGAVGIQTLIDAVPEMLNVANVAGVQVTNVGSPDITSDILLRLSAQINEVVCNDPTMAGAVVTHGTDTLEESAFFLDATVNCRKPVVIVGAMRPSTAISADGPLNLLQSVTVAASPKARDRGALIVMNDRIVSAFYASKTNANTVDTFKAIEMGNLGEVVSNKPYFFYPPVKPTGKTEVDIRNITSIPRVDILYSYEDMHNDTLYSAIDNGAVGIVIAGSGSGSVSTPFAAAMEDITTKHNIPIVRSTRVGNGEVPPSAEWSQIASGYLNPQKARILLGLLLAQGKSIEEMRAVF

SEQ ID NO: 72069 - protein, 353 aa, Aspergillus oryzae
SPLLYPRATDSNVTYVFTNPNGLNFTQMNTTLPNVTIFATGGTIAGSSADKTATTGYKAGAVGIQTLIDAVPEMLNVANVAGVQVTNVGSPDITSDILLRLSKQINEVVCNDPTMAGAVVTHGTDTLEESAFFLDATVNCRKPVVIVGAMRPSTAISADGPLNLLQSVTVAASPKARDRGALIVMNDRIVSAFYASKTNANTVDTFKAIEMGNLGEVVSNKPYFFYPPVKPTGKTEVDIRNITSIPRVDILYSYEDMHNDTLYSAIDNGAKGIVIAGSGSGSVSTPFSAAMEDITTKHNIPIVRSTRVGNGEVPSSAESSQIASGYLNPQKARILLGLLLAQGRSIEEMRAVF

SEQ ID NO: 72070 - protein, 353 aa, Aspergillus oryzae
SPLLYPRATDSNVTYVFTNPNGLNFTQMNTTLPNVTIFATGGTIAGSSADNTATTGYKAGAVGIQTLIDAVPEMLNVANVAGVQVTNVGSPDITSDILLRLSKQINEVVCNDPTMAGAVVTHGTDTLEESAFFLDATVNCRKPVVIVGAMRPSTAISADGPLNLLQSVTVAASPKARDRGALIVMDDRIVSAFYASKTNANTVDTFKAIEMGNLGEVVSNKPYFFYPPVKPTGKTEVDIRNITSIPRVDILYSYEDMHNDTLYSAIDNGAKGIVIAGSGSGSVSTPFSAAMEDITTKHNIPIVASTRTGNGEVPSSAESSQIASGYLNPAKSRVLLGLLLAQGKSIEEMRAVF

SEQ ID NO: 72071 - protein, 353 aa, Aspergillus oryzae
SPLLYPRATDSNVTYVFTNPNGLNFTQMNTTLPNVTIFATGGTIAGSSADKTATTGYKAGAVGVDTLIDAVPEMLNVANVAGVQVTNVGSPDITSDILLRLSKQINEVVCNDPTMAGAVVTHGTDTLEESAFFLDATVNCRKPVVIVGAMRPSTAISADGPLNLLQSVTVAASPKARDRGALIVMDDRIVSAFYASKTNANTVDTFKAIEMGNLGEVVSNKPYFFYPPVKPTGKTEVDIRNITSIPRVDILYSYEDMHNDTLYSAIDNGAKGIVIAGSGSGSVSTPFSAAMEDITTKHNIPIVRSTRVGNGEVPSSAESSQIASGYLNPAKSRVLLGLLLAQGKSIEEMRAVF

SEQ ID NO: 72072 - protein, 353 aa, Aspergillus oryzae
SPLLYPRATDSNVTYVFTNPNGLNFTQMNTTLPNVTIFATGGTIAGSSADKTATTGYKAGAVGIQTLIDAVPEMLNVANVAGVQVTNVGSPDITSDILLRLSKQINEVVCNDPTMAGAVVTHGTDTLEESAFFLDATVNCRKPVVIVGAMRPSTAISADGPLNLLQSVTVAASPKARERGALIVMNDRIVSAFYATKTNANTVDTFKAIEMGNLGEVVSNKPYFFYPPVKPTGKTEVDVRNITSIPRVDILYSYEDMHNDTLYSAIDNGAKGIVIAGSGSGSVSTPFAAAMEDITTKHNIPIVRSTRVGNGEVPSSAESSQIASGYLNPQKARILLGLLLAQGKSIEEMRAVF

SEQ ID NO: 72073 - protein, 353 aa, Aspergillus oryzae
SPLLYPRATDSNVTYVFTNPNGLNFTQMNTTLPNVTIFATGGTIAGSSADKTATTGYKAGAVGIQTLIDAVPEMLNVANVAGVQVTNVGSPDITSDILLRLSAQINEVVCNDPTMAGAVVTHGTDTLEESAFFLDATVNCRKPVVIVGAMRPSTAISADGPLNLLQSVTVAASPLARDRGALIVMNDRIVSAFYASKTNANTVDTFKAIEMGNLGEVVSNKPYFFYPPVKPTGKTEVDIRNITSIPRVDILYSYEDMHNDTLYSAIDNGAKGIVIAGSGSGSVSTPFAAAMEDITTKHNIPIVRSTRVGNGEVPSSAESSQIASGYLNPQKARILLGLLLAQGKSIEEMRAVF

SEQ ID NO: 72074 - protein, 353 aa, Aspergillus oryzae
SPLLYPRATDSNVTYVFTNPNGLNFTQMNTTLPNVTIFATGGTIAGSSADKTATTGYKAGAVGIQTLIDAVPEMLNVANVAGVQVTNVGSPDITSDILLRLSAQINEVVCNDPTMAGAVVTHGTDTLEESAFFLDATVNCRKPVVIVGAMRPSTAISADGPLNLLQSVTVAASPKARDRGALIVMNDRIVSAFYASKTNANTVDTFKAIEMGNLGEVVSNKPYFFYPPVKPTGKTEVDIVNITSIPRVDILYSYEDMHNDTLYSAIDNGAKGIVIAGSGSGSVSTPFAAAMEDITTKHNIPIVRSTRVGNGEVPSSAESSQIASGYLNPQKARILLGLLLAQGKSIEEMRAVF

SEQ ID NO: 72075 - protein, 353 aa, Aspergillus oryzae
SPLLYPRATDSNVTYVFTNPNGLNFTQMNTTLPNVTIFATGGTIAGSSADKTATTGYKAGAVGIQTLIDAVPEMLNVANVAGVQVTNVGSPDITSDILLRLSKQINEVVCNDPTMAGIVITHGTDTLEESAFFLDATVNCRKPVVIVGAMRPSTAISADGPLNLLQSVTVAASPKARDRGALIVMDDRIVSAFYASKTNANTVDTFKAIEMGNLGEVVSNKPYFFYPPVKPTGKTEVDIRNITSIPRVDILYSYEDMHNDTLYSAIDNGAKGIVIAGSGSGSVSTPFSAAMEDITTKHNIPIVASTRTGNGEVPSSAESSQIASGYLNPAKSRVLLGLLLAQGKSIEEMRAVF

SEQ ID NO: 72076 - protein, 353 aa, Aspergillus oryzae
SPLLYPRATDSNVTYVFTNPNGLNFTQMNTTLPNVTIFATGGTIAGSSADKTATTGYKAGAVGIQTLIDAVPEMLNVANVAGVQVTNVGSPDITSDILLRLSKQINEVCCNDPTMAGAVVTHGTDTLEESAFFLDATVNCRKPVVIVGAMRPSTAISADGPLNLLQSVTVAASPKARDRGALIVMNDRIVSAFYASKTNANTVDTFKAIEMGNLGEVVSNKPYFFYPPVKPTGKTEVDIRNITSIPRVDILYSYEDMHNDTLYSAIDNGAKGIVIAGSGSGSVSTPFAAAMEDITTKHNIPIVRSTRVGNGEVPSSAESSQIASGYLNPQKARILLGLLLAQGKSIEEMRAVF

SEQ ID NO: 72077 - protein, 353 aa, Aspergillus oryzae
SPLLYPRATDSNVTYVFTNPNGLNFTQMNTTLPNVTIFATGGTIAGSSADKTATTGYKAGAVGVDTLIDAVPEMLNVANVAGDQVTNVGSPDITSDILLRLSKQINEVVCNDPTMAGAVVTHGTDTLEESAFFLDATVNCRKPVVIVGAMRPSTAISADGPLNLLQSVTVAASPKARDRGALIVMDDRIVSAFYASKTNANTVDTFKAIEMGNLGEVVSNKPYFFYPPVKPTGKTEVDIRNITSIPRVDILYSYEDMHNDTLYSAIDNGAKGIVIAGSGSGSVSTPFSAAMEDITTKHNIPIVRSTRVGNGEVPSSAESSQIASGYLNPQKARILLGLLLAQGKSIEEMRAVF

SEQ ID NO: 72078 - protein, 353 aa, Aspergillus oryzae
SPLLYPRATDSNVTYVFTNPNGLNFTQMNTTLPNVTIFATGGTIAGSSADKTATTGYKAGAVGIQTLIDAVPEMLNVANVAGVQVTNVGSPDITSDILLRLSRQINEVVCNDPTMAGAVVTHGTDTLEESAFFLDATVNCRKPVVIVGAMRPSTAISADGPLNLLQSVTVAASPLARDRGALIVMNDRIVSAFYASKTNANTVDTFKAIEMGNLGEVVSNKPYFFYPPVKPTGKTEVDIRNITSIPRVDILYSYEDMHNDTLYCAIDNGAKGIVIAGSGSGSVSTPFAAAMEDITTKHNIPIVRSTRVGNGEVPSSAESSQIASGYLNPQKARILLGLLLAQGKSIEEMRAVF

SEQ ID NO: 72079 - protein, 353 aa, Aspergillus oryzae
SPLLYPRATDSNVTYVFTNPNGLNFTQMNTTLPNVTIFATGGTIAGSSADKTATTGYKAGAVGIQTLIDAVPEMLNVANVAGVQVTNVGSPDITSDILLRLSAQINEVVCNDPTMAGAVVTHGTDTLEESAFFLDATVNCRKPVVIVGAMRPSTAISADGPLNLLQSVTVAASPKARDRGALIVMNDRIVSAFYASKTNANTVDTFKAIEMGNLGEVVSNKEYFFYPPVKPTGKTEVDIRNITSIPRVDILYSYEDMHNDTLYSAIDNGAKGIVIAGSGSGSVSTPFAAAMEDITTKHNIPIVRSTRVGNGEVPPSAESSQIASGYLNPQKARILLGLLLAQGKSIEEMRAVF

SEQ ID NO: 72080 - protein, 353 aa, Aspergillus oryzae
SPLLYPRATDSNVTYVFTNPNGLNFTQMNTTLPNVTIFATGGTIAGSSADKTATTGYKAGAVGIQTLIDAVPEMLNVANVAGVQVTNVGSPDITSDILLRLSKQINEVVCNDPTMAGAVVTHGTDTLEESAFFLDATVNCRKPVVIVGAMRPSTAISADGPLNLLQSVTVAASPKARDRGALIVMDDRIVSAFYASKTNANTVDTFKAIEMGNLGEVVSNKPYFFYPPVKPTGKTEVDIRNITSIPRVDILYSYEDMHNDTLYSAIDNGAKGIVIAGSGSGSVSTPFSAAMEDITTKHNIPIVASTRTGNGEVPSSAESSQIASGYLNPAKSRVLLGLLLAQGKSIEEMRAVF

SEQ ID NO: 72081 - protein, 353 aa, Aspergillus oryzae
SPLLYPRATDSNVTYVFTNPNGLNFTQMNTTLPNVTIFATGGTIAGSSADKTATTGYKAGAVGIQTLIDAVPEMLNVANVAGVQVTNVGSPDITSDILLRLSAQINEVVCNDPTMAGAVVTHGTDTLEESAFFLDATVNCRKPVVIVGAMRPSTAISADGPLNLLQSVTVAASPKARDRGALIVMNDRIVSAFYASKTNANTVDTFKAIEMGNLGEVVSNREYFFYPPVKPTGRTEVDIRNITSIPRVDILYSYEDMHNDTLYSAIDNGAKGIVIAGSGAGSVSTPFAAAMEDITTKHNIPIVRSTRVGNGEVPPSAESSQIASGYLNPQKARILLGLLLAQGKSIEEMRAVF

SEQ ID NO: 72082 - protein, 353 aa, Aspergillus oryzae
SPLLYPRATDSNVTYVFTNPNGLNFTQMNTTLPNVTIFATGGTIAGSSADKTATTGYKAGAVGIQTLIDAVPEMLNVANVAGVQVTNVGSPDITSDILLRLSAQINEVVCNDPTMAGAVVTHGTDTLEESAFFLDATVNCRKPVVIVGAMRPSTAISADGPLNLLQSVTVAASPKARDRGALIVMNDRIVSAFYASKTNANTVDTFKAIEMGNLGEVVSNKPYFFYPPVKPTGKTEVDIRNITSIPRVDILYSYEDMHNDTLYSAIDNGAVGIVIAGSGSGSVSTPFAAAMEDITTKHNIPIVRSTRVGNGEVPSSAEWSQIASGYLNPQKARILLGLLLAQGKSIEEMRAVF

SEQ ID NO: 72083 - protein, 353 aa, Aspergillus oryzae
SPLLYPRATDSNVTYVFTNPNGLNFTQMNTTLPNVTIFATGGTIAGSSADKTATTGYKAGAVGIQTLIDAVPEMLNVANVAGVQVTNVGSPDITSDILLRLSAQINEVVCNDPTMAGAVVTHGTDTLEESAFFLDATVNCRKPVVIVGAMRPSTAISADGPLNLLQSVTVAASPKARDRGALIVMNDRIVSAFYASKTNANTVDTFKAIEMGNLGEVVSNKEYFFYPPVKPTGKTEVDIRNITSIPRVDILYSYEDMHNDTLYSAIDNGAKGIVIAGSGAGSVSTPFAAAMEDITTKHNIPIVRSTRVGNGEVPPSAEWSQIASGYLNPQKARILLGLLLAQGKSIEEMRAVF

SEQ ID NO: 72084 - protein, 353 aa, Aspergillus oryzae
SPLLYPRATDSNVTYVFTNPNGLNFTQMNTTLPNVTIFATGGTIAGSSADKTATTGYKAGAVGIQTLIDAVPEMLNVANVAGVQVTNVGSPDITSDILLRLSAQINEVVCNDPTMAGAVVTHGTDTLEESAFFLDATVNCRKPVVIVGAMRPSTAISADGPLNLLQSVTVAASPKARDRGALIVMNDRIVSAFYASKTNANTVDTFKAIEMGNLGEVVSNKEYFFYPPVKPTGKTEVDIRNITSIPRVDILYSYEDMHNDTLYSAIDNGAKGIVIAGSGAGSVSTPFAAAMEDITTKHNIPIVRSTRVGNGEVPWSAEWSQIASGYLNPQKARILLGLLLAQGKSIEEMRAVF

SEQ ID NO: 72085 - protein, 353 aa, Aspergillus oryzae
SPLLYPRATDSNVTYVFTNPNGLNFTQMNTTLPNVTIFATGGTIAGSSADKTATTGYKAGAVGIQTLIDAVPEMLNVANVAGVQVTNVGSPDITSDILLRLSKQINEVVCNDPTMAGAVVTHGTDTLEESAFFLDATVNCRKPVVIVGAMRPSTAISADGPLNLYNAVTVAASPKARDRGALIVMDDRIVSAFYASKTNANTVDTFKAIEMGNLGEVVSNKPYFFYPPVKPTGKTEVDIRNITSIPRVDILYSYEDMHNDTLYSAIDNGAKGIVIAGSGSGSVSTPFSAAMEDITTKHNIPIVASTRTGNGEVPSSAESSQIASGYLNPAKSRVLLGLLLAQGKSIEEMRAVF

SEQ ID NO: 72086 - protein, 343 aa, Aspergillus oryzae
SNVTYVFTNPNGLNFTQMNTTLPNVTIFATGGTIAGSSADNTATTGYKAGAVGIQTLIDAVPEMLNVANVAGVQVTNVGSPDITSDILLRLSKQINEVVCNDPTMAGAVVTHGTDTLEESAFFLDATVNCRKPVVIVGAMRPSTAISADGPLNLLQSVTVAASPKARDRGALIVMNDRIVSAFYASKTNANTVDTFKAIEMGNLGEVVSNKPYFFYPPVKPTGKTEVDIRNITSIPRVDILYSYEDMHNDTLYSAIDNGAKGIVIAGSGSGSVSTPFSAAMEDITTKHNIPIVASTRTGNGEVPSSAESSQIASGYLNPAKSRVLLGLLLAQGKSIEEMRAVF

SEQ ID NO: 72087 - protein, 350 aa, Aspergillus oryzae
SPLLYPRSNVTYVFTNPNGLNFTQMNTTLPNVTIFATGGTIAGSSADKTATTGYKAGAVGIQTLIDAVPEMLNVANVAGVQVTNVGSPDITSDILLRLSAQINEVVCNDPTMAGAVVTHGTDTLEESAFFLDATVNCRKPVVIVGAMRPSTAISADGPLNLLQSVTVAASPKARDRGALIVMNDRIVSAFYASKTNANTVDTFKAIEMGNLGEVVSNKEYFFYPPVKPTGKTEVDIRNITSIPRVDILYSYEDMHNDTLYSAIDNGAKGIVIAGSGAGSVSTPFAAAMEDITTKHNIPIVRSTRVGNGEVPPSAEWSQIASGYLNPQKARILLGLLLAQGKSIEEMRAVF

SEQ ID NO: 72088 - protein, 353 aa, Aspergillus oryzae
SPLLYPRATDSNVTYVFTNPNGLNFTQMNTTLPNVTIFATGGTIAGSSADKTATTGYKAGAVGIQTLIDAVPEMLNVANVAGVQVTNVGSPDITSDILLRLSKQINEVVCNDPTMAGAVVTHGTDTLEESAFFLDATVNCRKPVVIVGAMRPSTAISADGPLNLLQSVTVAASPKARDRGALIVMDDRIVSAFYASKTNANTVDTFKAIEMGNLGEVVSNKPYFFYPPVKPTGKTEVDIRNITSIPRVDILYSYEDMHNDTLYSAIDNGAKGIVIAGSGSGSVSTPFSAAMEDITTKHNIPIVASTRTGNGEVPSSAESSQIASGYLNPAKSRVLLMLLLAQGKSIEEMRAVF

SEQ ID NO: 72089 - protein, 353 aa, Aspergillus oryzae
SPLLYPRATDSNVTYVFTNPNGLNFTQMNTTLPNVTIFATGGTIAGSSADKTATTGYKAGAVGIQTLIDAVPEMLNVANVAGVQVTNVGSPDITSDILLRLSAQINEVVCNDPTMAGAVVTHGTDTLEESAFFLDATVNCRKPVVIVGAMRPSTAISADGPLNLLQSVTVAASPKARDRGALIVMNDRIVSAFYASKTNANTVDTFKAIEMGNLGEVVSNKEYFFYPPVKPTGKTEVDIRNITSIPRVDILYSYEDMHNDTLYSAIDNGAVGIVIAGSGSGSVSTPFAAAMEDITTKHNIPIVRSTRVGNGEVPSSAEWSQIASGYLNPQKARILLGLLLAQGKSIEEMRAVF

SEQ ID NO: 72090 - protein, 353 aa, Aspergillus oryzae
SPLLYPRATDSNVTYVFTNPNGLNFTQMNTTLPNVTIFATGGTIAGSSADKTATTGYKAGAVGIQTLIDAVPEMLNVANVAGVQVTNVGSPDITSDILLRLSKQINEVVCNDPTMAGAVVTHGTDTLEESAFFLDATVNCRKPVVIVGAMRPSTAISADGPLNLLQSVTVAASPKARDRGALIVMDDRIGSAFYASKTNANTVDTFKAIEMGNLGEVVSNKPYFFYPPVKPTGKTEVDIRNITSIPRVDILYSYEDMHNDTLYSAIDNGAKGIVIAGSGSGSVSTPFSAAMEDITTKHNIPIVRSSRVGNGEVPSSAESSQIASGYLNPAKSRVLLGLLLAQGKSIEEMRAVF

SEQ ID NO: 72091 - protein, 353 aa, Aspergillus oryzae
SPLLYPRATDSNVTYVFTNPNGLNFTQMNTTLPNVTIFATGGTIAGSSADKTATTGYKAGAVGIQTLIDAVPEMLNVANVAGVQVTNVGSPDITSDILLRLSKQINEVVCNDPTMAGAVVTHGTDTLEESAFFLDATVNCRKPVVLVGAMRPSTAISADGPLNLLQSVTVAASPKARDRGALIVMDDRIVSAFYASKTNANTVDTFKAIEMGNLGEVVSNKPYFFYPPVKPTGKTEVDIRNITSIPRVDILYSYEDMHNDTLYSAIDNGAKGIVIAGSGSGSVSTPFSAAMEDITTKHNIPIVASTRTGNGEVPSSAESSQIASGYLNPAKSRVLLGLLLAQGKSIEEMRAVF

SEQ ID NO: 72092 - protein, 353 aa, Aspergillus oryzae
SPLLYPRATDSNVTYVFTNPNGLNFTQMNTTLPNVTIFATGGTIAGSSADKCATTGYKAGAVGIQTLIDAVPEMLNVANVAGVQVTNVGSPDITSDILLRLSKQINEVVCNDPTMAGAVVTHGTDTLEESAFFLDATVNCRKPVVIVGAMRPSTAISADGPLNLLQSVTVAASPKARDRGALIVMNDRIVSAFYASKTNANTVDTFKAIEMGNLGEVVSCKPYFFYPPVKPTGKTEVDIRNITSIPRVDILYSYEDMHNDTLYSAIDNGAKGIVIAGSGSGSVSTPFAAAMEDITTKHNIPIVRSTRVGNGEVPSSAESSQIASGYLNPQKARILLGLLLAQGKSIEEMRAVF

SEQ ID NO: 72093 - protein, 353 aa, Aspergillus oryzae
SPLLYPRATDSNVTYVFTNPNGLNFTQMNTTLPNITIFATGGTIAGSSADKTATTGYKAGAVGIQTLIDAVPEMLNVANVAGVQVTNVGSPDITSDILLRLSKQINEVVCNDPTMAGAVVTHGTDTLEESAFFLDATVNCRKPVVIVGAMRPSTAISADGPLNLLQSVTVAASPKARDRGALIVMDDRIVSAFYASKTNANTVDTFKAIEMGNLGEVVSNKPYFFYPPVKPTGKTEVDIRNITSIPRVDILYSYEDMHNDTLYSAIDNGAKGIVIAGSGSGSVSTPFSAAMEDITTKHNIPIVASTRTGNGEVPSSAESSQIASGYLNPAKSRVLLGLLLAQGKSIEEMRAVF

SEQ ID NO: 72094 - protein, 353 aa, Aspergillus oryzae
SPLLYPRATDSNVTYVFTNPNGLNFTQMNTTLPNVTIFATGGTIAGSSADKTATTGYKAGAVGIQTLIDAVPEMLNVANVAGVQVTNVGSPDITSDILLRLSKQINEVVCNDPTMAGAVVTHGTDTLEESAFFLDATVNCRKPVVIVGAMRPSTAISADGPLNLLQSVTVAASPKARDRGALIVMDDRIVSAFYASKTNANTVDAFKAIEMGNLGEVVSNKPYFFYPPVKPTGKTEVDIRNITSIPRVDILYSYEDMHNDTLYSAIDNGAKGIVIAGSGSGSVSTPFSAAMEDITTKHNIPIVASTRTGNGEVPSSAESSQIASGYLNPAKSRVLLGLLLAQGKSIEEMRAVF

SEQ ID NO: 72095 - protein, 353 aa, Aspergillus oryzae
SPLLYPRATDSNVTYVFTNPNGLNFTQMNTTLPNVTIFATGGTIAGSSADKTATTGYKAGAVGIQTLIDAVPEMLNVANVAGVQVTNVGSPDITSDILLRLSAQINEVVCNDPTMAGAVVTHGTDTLEESAFFLDATVNCRKPVVIVGAMRPSTAISADGPLNLLQSVTVAASPKARDRGALIVMNDRIVSAFYASKTNANTVDTFKAIEMGNLGEVVSNKEYFFYPPVKPTGKTEVDICNITSIPRVDILYSYEDMHNDTLYSAIDNGAKGIVIAGSGSGSVSTPFAAAMEDITTKHNIPIVRSTRVGNGEVPSSAESSQIASGYLNPQKARILLGLLLAQGKSIEEMRAVF

SEQ ID NO: 72096 - protein, 353 aa, Aspergillus oryzae
SPLLYPRATDSNVTYVFTNPNGLNFTQMNTTLPNVTIFATGGTIAGSSADKTATTGYKAGAVGIQTLIDAVPEMLNVANVAGDQVTNVGSPDITSDILLRLSKQINEVVCNDPTMAGAVVTHGTDTLEESAFFLDATVNCRKPVVIVGAMRPSTAISADGPLNLLQSVTVAASPKARDRGALIVMDDRIVSAFYASKTNANTVDTFKAIEMGNLGEVVSNKPYFFYPPVKPTGKTEVDIRNITSIPRVDILYSYEDMHNDTLYSAIDNGAKGIVIAGSGSGSVSTPFSAAMEDITTKHNIPIVRSTRVGNGEVPSSAESSQIASGYLNPQKARILLGLLLAQGKSIEEMRAVF

SEQ ID NO: 72097 - protein, 353 aa, Aspergillus oryzae
SPLLYPRATDSNVTYVFTNPNGLNFTQMNTTLPNVTIFATGGTIAGSSADKTATCGYKAGAVGIQTLIDAVPEMLNVANVAGVQVTNVGSPDITSDILLRLSKQINEVVCNDPTMAGAVVTHGTDTLEESAFFLDATVNCRKPVVIVGAMRPSTAISADGPLNLLQSVTVAASPKARDRGALIVMNDRIVSAFYASKTNANTVDTFKAIEMGNLGEVVCNKPYFFYPPVKPTGKTEVDIRNITSIPRVDILYSYEDMHNDTLYSAIDNGAKGIVIAGSGSGSVSTPFAAAMEDITTKHNIPIVRSTRVGNGEVPSSAESSQIASGYLNPQKARILLGLLLAQGKSIEEMRAVF

SEQ ID NO: 72098 - protein, 353 aa, Aspergillus oryzae
SPLLYPRATDSNVTYVFTNPNGLNFTQMNTTLPNVTIFATGGTIAGSSADKTATTGYKAGAVGIQTLIDAVPEMLNVANVAGVQVTNVGSPDITSDILLRLSKQINEVVCNDPTMAGAVVTHGTDTLEESAFFLDATVNCRKPVVIVGAMRPSTAISADGPLNLLQSVTVAASPKARDRGALIVMDDRIVSAFYASKTNANTVDTFKAIEMGNLGEVVSNKPYFFYPPVKPTGKTEVDIRNITSIPRVDILYSYEDMHNDTLYSAIDNGAKGIVIAGSGSGSVSTPFSAAMEDITTKHNIPIVRSTRVGNGEVPSSAESSQIASGYLNPAKSRVLLGLLLAQGKSIEEMRAVF

SEQ ID NO: 72099 - protein, 323 aa, Aspergillus oryzae
TLPNVTIFATGGTIAGSSADNTATTGYKAGAVGIQTLIDAVPEMLNVANVAGVQVTNVGSPDITSDILLRLSKQINEVVCNDPTMAGAVVTHGTDTLEESAFFLDATVNCRKPVVIVGAMRPSTAISADGPLNLLQSVTVAASPKARDRGALIVMNDRIVSAFYASKTNANTVDTFKAIEMGNLGEVVSNKPYFFYPPVKPTGKTEVDIRNITSIPRVDILYSYEDMHNDTLYSAIDNGAKGIVIAGSGSGSVSTPFSAAMEDITTKHNIPIVASTRTGNGEVPSSAESSQIASGYLNPAKSRVLLGLLLAQGKSIEEMRAVF

SEQ ID NO: 72100 - protein, 378 aa, ASPERGILLUS NIDULANS FGSC A4
MGLRVKALAVAALATLSQASPVLYTREDTTSNTTYAFTNSNGLNFTQMNTTLPNVTIFATGGTIAGSAASNTATTGYQAGALGIQTLIDAVPEMLSVANIAGVQISNVGSPDVTSTILLEMAHRLNKVVCEDPSMAGAVVTHGTDTLEETAFFLDATVNCGKPIVIVGAMRPATAISADGPYNLLQAVTVASTKEARNRGAMVVMNDRIASAYYVSKTNANTMDTFKAVEMGYLGAIISNTPFFYYPAVQPSGKTTVDVSNVTSIPRVDILYSFQDMTNDTLYSSIENGAKGVVIAGSGAGSVDTAFSTAIDDIISNQGVPIVQSTRTGNGEVPYSAEGGISSGFLNPAKSRILLGLLLAQGGKGTEEIRAVFGKVAV

SEQ ID NO: 72101 - protein, 353 aa, Aspergillus oryzae
SPLLYPRATDSNVTYVFTNPNGLNFTQMNTTLPNVTIFATGGTIAGSSADKTATTGYKAGAVGIQTLIDAVPEMLNVANVAGVQVTNVGSPDITSDILLRLSKQINEVVCNDPTMAGAVVTHGTDTLEESAFFLDATVNCRKPVVIVGAMRPATAISADGPLNLLQSVTVAASPKARDRGALIVMDDRIVSAFYASKTNANTVDTFKAIEMGNLGEVVSNKPYFFYPPVKPTGKTEVDIRNITSIPRVDILYSYEDMHNDTLYSAIDNGAKGIVIAGSGSGSVSTPFSAAMEDITTKHNIPIVRSSRVGNGEVPSSAESSQIASGYLNPAKSRVLLGLLLAQGKSIEEMRAVF

SEQ ID NO: 72102 - protein, 353 aa, Aspergillus oryzae
SPLLYPRATDSNVTYVFTNPNGLNFTQMNTTLPNVTIFATGGTIAGSSADKTATTGYKAGAVGIQTLIDAVPELKDLANVAGVQVTNVGSPDITSDILLRLSKQINEVVCNDPTMAGAVVTHGTDTLEESAFFLDATVNCRKPVVIVGAMRPSTAISADGPLNLLQSVTVAASPKARDRGALIVMDDRIVSAFYASKTNANTVDTFKAIEMGNLGEVVSNKPYFFYPPVKPTGKTEVDIRNITSIPRVDILYSYEDMHNDTLYSAIDNGAKGIVIAGSGSGSVSTPFSAAMEDITTKHNIPIVASTRTGNGEVPSSAESSQIASGYLNPAKSRVLLGLLLAQGKSIEEMRAVF

SEQ ID NO: 72103 - protein, 353 aa, Aspergillus oryzae
SPLLYPRATDSNVTYVFTNPNGLNFTQMNTTLPNVTIFATGGTIAGSSADKTATTGYKAGAVGIQTLIDAVPEMLNVANVAGVQVTNVGSPDITSDILLRLSKQINEVVCNDPTMAGAVVTHGTDTLEESAFFLDATVNCRKPVVIVGAMRPSTAISADGPLNLLQSVTVAASPKARDRGALIVMDDRIVSAFYASKTNANTVDTFKAIEMGNLGEVVSNKPYFFYPPVKPTGKTEVDIRKIDSIPRVDILYSYEDMHNDTLYSAIDNGAKGIVIAGSGSGSVSTPFSAAMEDITTKHNIPIVASTRTGNGEVPSSAESSQIASGYLNPAKSRVLLGLLLAQGKSIEEMRAVF

SEQ ID NO: 72104 - protein, 353 aa, Aspergillus oryzae
SPLLYPRATDSNVTYVFTNPNGLNFTQMNTTLPNVTIFATGGTIAGSSADKTATTGYKAGAVGIQTLIDAVPEMLNVANVAGVQVTNVGSPDITSDILLRLSKQINEVVCNDPTMAGAVVTHGTDTLEESAFFLDATVNCRKPVVIVGAMRPSTAISADGPLNLLQSVTVAASPKARDRGALIVMDDRIVSAFYASKTNANTVDTFKAIEMGNLGEVVSNKPYFFYPPVKPTGKTEVDIRNITSLPKVDILYSYEDMHNDTLYSAIDNGAKGIVIAGSGSGSVSTPFSAAMEDITTKHNIPIVASTRTGNGEVPSSAESSQIASGYLNPAKSRVLLGLLLAQGKSIEEMRAVF

SEQ ID NO: 72105 - protein, 353 aa, Aspergillus oryzae
SPLLYPRATDSNVTYVFTNPNGLNFTQMNTTLPNVTIFATGGTIAGSSADKTATTGYKAGAVGIQTLIDAVPEMLNVANVAGVQVTNVGSPDITSDILLRLSKQINEVVCNDPTMAGAVVTHGTDTLEESAFFLDATVNCRKPVVIVGAMRPSTAISADGPLNLLQSVTVAASPKARDRGALIVMDDRIVSAFYASKTNTTTVDTFKAIEMGNLGEVVSNKPYFFYPPVKPTGKTEVDIRNITSIPRVDILYSYEDMHNDTLYSAIDNGAKGIVIAGSGSGSVSTPFSAAMEDITTKHNIPIVASTRTGNGEVPSSAESSQIASGYLNPAKSRVLLGLLLAQGKSIEEMRAVF

SEQ ID NO: 72106 - protein, 353 aa, Aspergillus oryzae
SPLLYPRATDSNVTYVFTNPNGLNFTQMNTTLPNVTIFATGGTIAGSSADKTATTGYKAGAVGIQTLIDAVPEMLNVANVAGVQVTNVGSPDITSDILLRLSRQINEVVCNDPTMAGAVGDHGTDTLEESAFFLDATVNCRKPVVIVGAMRPSTAISADGPLNLLQSVTVAASPKARDRGALIVMNDRIVSAFYASKTNANTVDTFKAIEMGNLGEVVSNKPYFFYPPVKPTGKTEVDYRNITSIPRVDILYSYEDMHNDTLYSAIDNGAKGIVIAGSGSGSVSTPFAAAMEDITTKHNIPIVRSTRVGNGEVPSSAESSQIASGYLNPQKARILLGLLLAQGKSIEEMRAVF

SEQ ID NO: 72107 - protein, 353 aa, Aspergillus oryzae
SPLLYPRATDSNVTYVFTNPNGLNFTQMNTTLPNVTIFATGGTIAGSSADKTATTGYKAGAVGIQTLIDAVPEMLNVANVAGVQVTNIGSPDITSDILLRLSKQINEVVCNDPTMAGAVVTHGTDTLEESAFFLDATVNCRKPVVIVGAMRPSTAISADGPLNLLQSVTVAASPKARDRGALIVMDDRIVSAFYASKTNANTVDTFKAIEMGNLGEVVSNKPYFFYPPVKPTGKTEVDIRNITSIPRVDILYSYEDMHNDTLYSAIDNGAKGIVIAGSGSGSVSTPFSAAMEDITTKHNIPIVRSSRVGNGEVPSSAESSQIASGYLNPAKSRVLLGLLLAQGKSIEEMRAVF

SEQ ID NO: 72108 - protein, 369 aa, Aspergillus niger
KPILLSALASLASASPLLYSRTTNETFVFTNANGLNFTQMNTTLPNVTIFATGGTIAGSDPSSTATTGYTSGAVGVLSLIDAVPSMLDVANVAGVQVANVGSEDITSDILISMSKKLNRVVCEDPTMAGAVITHGTDTLEETAFFLDATVNCGKPIVIVGAMRPSTAISADGPFNLLEAVTVAASTSARDRGAMVVMNDRIASAYYVTKTNANTMDTFKAMEMGYLGEMISNTPFFFYPPVKPTGKVAFDITNVTEIPRVDILFSYEDMHNDTLYNAISSGAQGIVIAGAGAGGVTTSFNEAIEDVVNRLEIPVVQSMRTVNGEVPLSDVSSDTATHIASGYLNPQKSRILLGLLLSQGKNITEIADVF

SEQ ID NO: 72109 - protein, 369 aa, Aspergillus niger
KPILLSALASLASASPLLYSRTTNETFVFTNANGLNFTQMNTTLPNVTIFATGGTIAGSDSSSTATTGYTSGAVGVLSLIDAVPYMLDVANVAGVQVANVGSEDITSDILISMSKKLNRVVCEDPTMAGAVITHGTDTLEETAFFLDATVNCGKPIVIVGAMRPSTAISADGPFNLLEAVTVAASTSARDRGAMVVMNDRIASAYYVTKTNANTMDTFKAMEMGYLGEMISNTPFFFYPPVKPTGKVAFDITNVTEIPRVDILFSYEDMHNDTLYNAISSGAQGIVIAGAGAGGVTTSFNEAIEDVINRLEIPVVQSMRTVNGEVPLSDVSSDTATHIASGYLNPQKSRILLGLLLSQGKNITEIADVF

SEQ ID NO: 72110 - protein, 369 aa, Aspergillus niger
KPILLSALASLASASPLLYSRTTNETFVFTNANGLNFTQMNTTLPNVTIFATGGTIAGSDSSSTATTGYTSGAVGVLSLIDAVPSMLDVANVAGVQVANVGSEDITSDILISMSKKLNRVVCEDPTMAGAVITHGTDTLEETAFFLDATVNCGKPIVIVGAMRPSTAISADGPFNLLEAVTVAASTSARDRGAMVVMNDRIASAYYVTKTNANTMDTFKAMEMGYLGEMISNTPFFFYPPVKPTGKVAFDITNVTEIPRVDILFSYEDMHNDTLYNAISSGAQGIVIAGAGAGGVTTSFNEAIEDVINRLEIPVVQSMRTVNGEVPLSDVSSDTATHIASGYLNPQKSRILLGLLLSQGKNITEIADVF

SEQ ID NO: 72111 - protein, 378 aa, Unidentified
MGLRVKALAVAALATLSQASPVLYTREDTTSNTTYAFTNSNGLNFTQMNTTLPNVTIFATGGTIAGSAASNTATTGYQAGALGIQTLIDAVPEMLSVANIAGVQISNVGSPDVTSTILLEMAHRLNKVVCEDPSMAGAVVTHGTDTLEETAFFLDATVNCGKPIVIVGAMRPATFISADGPYNLLQAVTVASTKEARNRGAMVVMNDRIASAYYVSKTNANTMDTFKAVEMGYLGAIISNTPFFYYPAVQPSGKTTVDVSNVTSIPRVDILYSFQDMTNDTLYSSIENGAKGVVIAGSGAGSVDTAFSTAIDDIISNQGVPIVQSTRTGNGEVPYSAEGGISSGFLNPAKSRILLGLLLAQGGKGTEEIRAVFGKVAV

SEQ ID NO: 72112 - protein, 353 aa, Aspergillus oryzae
SPLLYPRATDSNVTYVFTNPNGLNFTQMNTTLPNVTIFATGGTIAGSSADKTATTGYKAGAVGIQTPIDAVPEMLNVANVAGDQVTNVGSPDITSDILLRLSKQINEVVCNDPTMAGAVVTHGTDTLEESAFFLDATVNCRKPVVIVGAMRPSTAISADGPLNLLQSVTVAASPKARDRGALIVMDDRIVSAFYASKTNANTVDTFKAIEMGNLGEVVSNKPYFFYPPVKPTGKTEVDIRNITSIPRVDILYSYEDMHNDTLYSAIDNGAKGIVIAGSGSGSVSTPFSAAMEDITTKHNIPIVRSTRVGNGEVPSSAESSQIASGYLNPAKSRVLLGLLLAQGKSIEEMRAVF

SEQ ID NO: 72113 - protein, 353 aa, Aspergillus oryzae
SPLLYPRATDSNVTYVFTNPNGLNFTQMNTTLPNITILATGGTIAGSSADKTATTGYKAGAVGIQTLIDAVPEMLNVANVAGVQVTNVGSPDITSDILLRLSKQINEVVCNDPTMAGAVVTHGTDTLEESAFFLDATVNCRKPVVIVGAMRPSTAISADGPLNLLQSVTVAASPKARDRGALIVMDDRIVSAFYASKTNANTVDTFKAIEMGNLGEVVSNKPYFFYPPVKPTGKTEVDIRNITSIPRVDILYSYEDMHNDTLYSAIDNGAKGIVIAGSGSGSVSTPFSAAMEDITTKHNIPIVRSSRVGNGEVPSSAESSQIASGYLNPAKSRVLLGLLLAQGKSIEEMRAVF

SEQ ID NO: 72114 - protein, 353 aa, Aspergillus oryzae
SPLLYPRATDSNVTYVFTNPNGLNFTQMNTTLPNVTIFATGGTIAGSSADKTATTGYKAGAVGIQTLIDAVPEMLNVANVAGVQVTNVGSPDITSDILLRLSKQINEVVCNDPTMAGAVVTHGTDTLEESAFFLDATVNCRKPVVIVGAMRPSTAISADGPLNLLQSVTVAASPKARDRGALIVMDDRIVSAFYASKTNANTVDTFKAIEMGNLGEVVSNKPYFFYPPVKPTGKTEVDIRKIDSIPRVDILYSYEDMHNDTLYSAIDNGAKGIVIAGSGSGSVSTPFSAAMEDITTKHNIPIVRSSRVGNGEVPSSAESSQIASGYLNPAKSRVLLGLLLAQGKSIEEMRAVF

SEQ ID NO: 72115 - protein, 369 aa, Aspergillus niger
KPILLSALASLASASPLLYSRTTNETFVFTNANGLNFTQMNTTLPNVTIFATGGTIAGSGSSSTATTGYTSGAVGVLSLIDAVPSMLDVANVAGVQVANVGSEDITSDILISMSKKLNRVVCEDPTMASAVITHGTDTLEETAFFLDATVNCGKPIVIVGAMRPSTAISADGPFNLLEAVTVAASTSARDRGAMVVMNDRIASAYYVTKTNANTMDTFKAMEMGYLGEMISNTPFFFYPPVKPTGKVAFDITNVTEIPRVDILFSYEDMHNDTLYNAISSGAQGIVIAGAGAGGVTTSFNEAIEDVINRLEIPVVQSMRTVNGEVPLSDVSSDTATHIASGYLNPQKSRILLGLLLSQGKNITEIADVF

SEQ ID NO: 72116 - protein, 369 aa, Aspergillus niger
KPILLSALASLASASPLLYSRTTNETFVFTNANGLNFTQMNTTLPNVTIFATGGTIAGSGSSSTATTGYTSGAVGVLSLIDAVPSMLDVANVAGVQVANVGSEDITSGILISMSKKLNHVVCEDPTMAGAVITHGTDTLEETAFFLDATVNCGKPIVIVGAMRPSTAISADGPFNLLEAVTVAASTSARDRGAMVVMNDRIASAYYVTKTNANTMDTFKAMEMGYLGEMISNTPFFFYPPVKPTGKVAFDITNVTEIPRVDILFSYEDMHNDTLYNAISSGAQGIVIAGAGAGGVTTSFNEAIEDVINRLEIPVVQSMRTVNGEVPLSDVSSDTATHIASGYLNPQKSRILLGLLLSQGKNITEIADVF

SEQ ID NO: 72117 - protein, 369 aa, Aspergillus niger
KPILLSALASLASASPLLYSRTTNETFVFTNANGLNFTQMNTTLPNVTIFATGGTIAGSVSSSTATTGYTSGAVGVLSLIDAVPSMLDVANVAGVQVANVGSEDITSDILISMSKKLNRVVCEDPTMAGAVITHGTDTLEETAFFLDATVNCGKPIVIVGAMRPSTAISADGPFNLLEAVTVAASTSARDRGAMVVMNDRIASAYYVTKTNANTMDTFKAMEMGYLGEMISNTPFFFYPPVKPTGKVAFDITNVTEIPRVDILFSYEDMHNDTLYNAISSGAQGIVIAGAGAGGVTISFNEAIEDVINRLEIPVVQSMRTVNGEVPLSDVSSDTATHIASGYLNPQKSRILLGLLLSQGKNITEIADVF

SEQ ID NO: 72118 - protein, 369 aa, Aspergillus niger
KPILLSALASLASASPLLYSRTTNGTFVFANANGLNFTQMNTTLPNVTIFATGGTIAGSHSSSTATTGYTSGAVGVLSLIDAVPSMLDVANVAGVQVANVGSEDITSDILISMSKKLNRVVCEDPTMAGAVITHGTDTLEETAFFLDATVNCGKPIVIVGAMRPSTAISADGPFNLLEAVTVAASTSARDRGAMVVMNDRIASAYYVTKTNANTMDTFKAMEMGYLGEMISNTPFFFYPPVKPTGKVAFDITNVTEIPRVDILFSYEDMHNDTLYNAISSGAQGIVIAGAGAGGVTTSFNEAIEDVINRLEIPVVQSMRTVNGEVPLSDVSSDTATHIASGYLNPQKSRILLGLLLSQGKNITEIADVF

SEQ ID NO: 72119 - protein, 369 aa, Aspergillus niger
KPILLSALASLASASPLLYSRTTNETFVFTNANGLNFTQMNTTLPNVTIYATGGTIAGSDSSSTATTGYTSGAVGVLSLIDAVPSMLDVANVAGVQVANVGSEDITSDILISMSKNLNRVVCEDPTMAGAVITHGTDTLEETAFFLDATVNCGKPIVIVGAMRPSTAISADGPFNLLEAVTVAASTSARDRGAMVVMNDRIASAYYVTKTNANTMDTFKAMEMGYLGEMISNTPFFFYPPVKPTGKVAFDITNVTEIPRVDILFSYEDMHNDTLYNAISSGAQGIVIAGAGAGGVTTSFNEAIEDVINRLEIPVVQSMRTVNGEVPLSDVSSDTATHIASGYLNPQKSRILLGLLLSQGKNITEIADVF

SEQ ID NO: 72120 - protein, 369 aa, Aspergillus niger
KPILLSALASLASASPLLYSRTTNETFVFTNANGLNFTQMNTTLPNVTIFATGGTIAGSDSSSTATTGYTSGAVGVLSLIDAVPSMLDVANVAGVQVANVGSEDITSDILISMSKKLNRVVCEDPTMAGAVITHGTDTLEETAFFLDATVNCGKPIVIVGAMRPSTAISADGPFNLLEAVTVAASTSARDRDAMVVMNDRIASAYYVTKTNANTMDTFKAMEMGYLGEMISNTPFFFYPPVKPTGKVAFDITNVTEIPRVDILFSYEDMHNDTLYNAISSGAQGIVIAGVGAGGVTTSFNEAIEDVINRLEIPVVQSMRTVNGEVPLSDVSSDTATHIASGYLNPQKSRILLGLLLSQGKNITEIADVF

SEQ ID NO: 72121 - protein, 369 aa, Aspergillus niger
KPILLSALASLASASPLLYSRTTNETFVFTNANGLNFIQMNTTLPNVTIFATGGTIAGSGSSSTATTGYTSGAVGVLSLIDAVPFMLDVANVAGVQVANVGSEDITSDILISMSKKLNRVVCEDPTMAGAVITHGTDTLEETAFFLDATVNCGKPIVIVGAMRPSTAISADGPFNLLEAVTVAASTSARDRGAMVVMNDRIASAYYVTKTNANTMDTFKAMEMGYLGEMISNTPFFFYPPVKPTGKVAFDITNVTEIPRVDILFSYEDMHNDTLYNAISSGAQGIVIAGAGAGGVTTSFNEAIEDVINRLEIPVVQSMRTVNGEVPLSDVSSDTATHIASGYLNPQKSRILLGLLLSQGKNITEIADVF

SEQ ID NO: 72122 - protein, 369 aa, Aspergillus niger
KPILLSALASLASASPLLYSRTTNETFVFTNANGLNFTQMNTTLPNVTIFATGGTIAGSDSSSTATTGYTSGTVGVLSLIDAVPSMLDVANVAGVQVVNVGSEDITSDILISMSKKLNRVVCEDPTMAGAVITHGTDTLEETAFFLDATVNCGKPIVIVGAMRPSTAISADGPFNLLEAVTVAASTSARDRGAMVVMNDRIASAYYVTKTNANTMDTFKAMEMGYLGEMISNTPFFFYPPVKPTGKVAFDITNVTEIPRVDILFSYEDMHNDTLYNAISSGAQGIVIAGAGAGGVTTSFNEAIEDVINRLEIPVVQSMRTVNGEVPLSDVSSDTATHIASGYLNPQKSRILLGLLLSQGKNITEIADVF

SEQ ID NO: 72123 - protein, 369 aa, Aspergillus niger
KPILLSALASLAAASPLLYSRTTNETFVFTNANGLNFTQMNTTLPNVTIFATGGTIAGSGSSSTATTGYTSGAVGVLSLIDAVPSMLDVANVAGVQVANVGSEDITSDILISMSKKLNRVVCEDPTMASAVITHGTDTLEETAFFLDATVNCGKPIVIVGAMRPSTAISADGPFNLLEAVTVAASTSARDRGAMVVMNDRIASAYYVTKTNANTMDTFKAMEMGYLGEMISNTPFFFYPPVKPTGKVAFDITNVTEIPRVDILFSYEDMHNDTLYNAISSGAQGIVIAGVGAGGVTTSFNEAIEDVINRLEIPVVQSMRTVNGEVPLSDVSSDTATHIASGYLNPQKSRILLGLLLSQGKNITEIADVF

SEQ ID NO: 72124 - protein, 369 aa, Aspergillus niger
KPILLSALASLAAASPLLYSRTTNETFVFTNANGLNFTQMNTTLPNVTIFATGGTIAGSGSSSTATTGYTSGTVGVLSLIDAVPSMLDVANVAGVQVANVGSEDITSDILISMSKNLNRVVCEDPTMAGAVITHGTDTLEETAFFLDATVNCGKPIVIVGAMRPSTAISADGPFNLLEAVTVAASTSARDRGAMVVMNDRIASAYYVTKTNANTMDTFKAMEMGYLGEMISNTPFFFYPPVKPTGKVAFDITNVTEIPRVDILFSYEDMHNDTLYNAISSGAQGIVIAGAGAGGVTTSFNEAIEDVINRLEIPVVQSMRTVNGEVPLSDVSSDTATHIASGYLNPQKSRILLGLLLSQGKNITEIADVF

SEQ ID NO: 72125 - protein, 369 aa, Aspergillus niger
KPILLSALASLASASPLLYSRTTNETFVFTNANGLNFTQMNTTLPNVTIFATGGTIAGSDSSSTATTGYTSGAVGVLSLIDAVPSMLDVANVAGVQVANVGSEDITSDILISMSKKLNRVVCEDPTMAGAVITHGTNTLEETAFFLDATVNCGKPIVIVGAMRPSTAISADGPFNLLEAVTVAASTSARDRGAMVVMNDRIASAYYVTKTNANTMDTFKAMEMGYLGEMISNTPFFFYPPVKPTGKVAFDITNVTEIPRVDILFSYEDMHNDTLYNAISSGAQGIVIAGAGAGGVTTSFNEAIEDVINRLEIPVVQSMRTVNGEVPLSDVSSDTATHIASGYLNPQKSRILLGLLLSQGKNITEIADVF

SEQ ID NO: 72126 - protein, 353 aa, Aspergillus oryzae
SPLLYPRATDSNVTYVFTNPNGLNFTQMNTTLPNITILATGGTIAGSSADKTATTGYKAGAVGIQTLIDAVPEMLNVANVAGVQVTNVGSPDITSDILLRLSKQINEVVCNDPTMAGAVVTHGTDTLEESAFFLDATVNCRKPVVIVGAMRPSTAISADGPLNLLQSVTVAASPKARDRGALIVMDDRIVSAFYASKTNANTVDTFKAIEMGNLGEVVSNKPYFFYPPVKPTGKTEVDIRKIDSIPRVDILYSYEDMHNDTLYSAIDNGAKGIVIAGSGSGSVSTPFSAAMEDITTKHNIPIVRSSRVGNGEVPSSAESSQIASGYLNPQKARILLGLLLAQGKSIEEMRAVF

SEQ ID NO: 72127 - protein, 369 aa, Aspergillus niger
KPILLSALASLASASPLLYSRTTNETFVFTNANGLNFIQMNTTLPNVTIFATGGTIAGSGSSSTATTGYTSGAVGVLSLIDAVPVMLDVANVAGVQVANVGSEDITSGILISMSKKLNHVVCEDPTMAGAVITHGTDTLEETAFFLDATVNCGKPIVIVGAMRPSTAISADGPFNLLEAVTVAASTSARDRGAMVVMNDRIASAYYVTKTNANTMDTFKAMEMGYLGEMISNTPFFFYPPVKPTGKVAFDITNVTEIPRVDILFSYEDMHNDTLYNAISSGAQGIVIAGAGAGGVTTSFNEAIEDVINRLEIPVVQSMRTVNGEVPLSDVSSDTATHIASGYLNPQKSRILLGLLLSQGKNITEIADVF

SEQ ID NO: 72128 - protein, 369 aa, Aspergillus niger
KPILLSALASLASASPLLYSRTTNETFVFTNANGLNFTQMNTTLPNVTIFATGGTIAGSDSSSTATTGYTSGAVGVLSLIDAVPPMLDVANVAGVQVANVGSEDITSDILISMSKKLNRVVCEDPTMAGAVITHGTDTLEETAFFLDATVNCGKPIVLVGAMRPSTAISADGPFNLLEAVTVAASTSARDRGAMVVMNDRIASAYYVTKTNANTMDTFKAMEMGYLGEMISNTPFFFYPPVKPTGKVAFDITNVTEIPCVDILFSYEDMHNDTLYNAISSGAQGIVIAGAGAGGVTTSFNEAIEDVINRLEIPVVQSMRTVNGEVPLSDVSSDTATHIASGYLNPQKSRILLGLLLSQGKNITEIADVF

SEQ ID NO: 72129 - protein, 369 aa, Aspergillus niger
KPILLSALASLASASPLLYSRTTNETFVFTNANGLNFTQMNTTLPNVTIFATGGTIAGSDSSSTATTGYTSGAVGVLSLIDAVPSMLEVANVAGVQVANVGSEDITSDILISMSKKLNRVVCEDPTMAGAVITHGTDTLEETAFFLDATVNCGKPIVIVGAMRPSTTISADGPFNLLEAVTVAASTSARDRGAMVVMNDRIASAYYVTKTNANTMDTFKAMEMGYLGEMISNTPFFFYPPVKPTGKVAFDITNVTEIPHVDILFSYEDMHNDTLYNAISSGAQGIVIAGAGAGGVTTSFNEAIEDVINRLEIPVVQSMRTVNGEVPLSDVSSDTATHIASGYLNPQKSRILLGLLLSQGKNITEIADVF

SEQ ID NO: 72130 - protein, 369 aa, Aspergillus niger
KPILLSALASLASTSPLLYSRTTNETFVFTNANGLNFTQMNTTLPNVTIFATGGTIAGSGSSSTATTGYTSGAVGVLSLIDAVPSMLDVANVAGVQVANVGSEDITSDILISMSKNLNRVVCEDPTMAGAVITHGTDTLEETAFFLDATVNCGKPIVIVGAMRPSTAISADGPFNLLEAVTVAASTSARDRGAMVVMNDRIASAYYVTKTNANTMDTFKAMEMGYLGEMISNTPFFFYPPVKPTGKVAFDITNVTEIPCVDILFSYEDMHNDTLYNAISSGAQGIVIAGAGAGGVTTSFNEAIEDVINRLEIPVVQSMRTVNGEVPLSDVSSDTATHIASGYLNPQKSRILLGLLLSQGKNITEIADVF

SEQ ID NO: 72131 - protein, 369 aa, Aspergillus niger
KPILLSALASLASASPLLYSRTTNETFVFTNANGLNFTQMNTTLPNVTIFATGGTIAGSDSSSTATTGYTSGAIGVLSLIDAVPSMLDVANVAGVQVANVGSEDITSDILISMSKKLNRAVCEDPTMAGAVITHGTDTLEETAFFLDATVNCGKPIVIVGAMRPSTAISADGPFNLLEAVTVAASTSARDRGAMVVMNDRIASAYYVTKTNANTMDTFKAMEMGYLGEMISNTPFFFYPPVKPTGKVAFDITNVTEIPRVDILFSYEDMHNDTLYNAISSGAQGIVIAGAGAGGVTTSFNEAIEDVINRLDIPVVQSMRTVNGEVPLSDVSSDTATHIASGYLNPQKSRILLGLLLSQGKNITEIADVF

SEQ ID NO: 72132 - protein, 369 aa, Aspergillus niger
KPILLSALASLASASPLLYSRTTNETFVFTNANGLNFTQMNTTLPNVTIFATGGTIAGSDSSSTATTGYTSGAVGVLSLIDAVPSMVDVANVAGVQVANVGSEDITSDILISMSKNLNRVVCEDPTMAGAVITHGTDTLEETAFFLDATVNCGKPIVIVGAMRPSTAISADGPFNLLEAVTVAASTSARDRGAMVVMNDRIASAYYVTKTNANTMDTFKAMEMGHLGEMISNTPFFFYPPVKPTGKVAFDITNVTEIPCVDILFSYEDMHNDTLYNAISSGAQGIVIAGAGAGGVTTSFNEAIEDVINRLEIPVVQSMRTVNGEVPLSDVSSDTATHIASGYLNPQKSRILLGLLLSQGKNITEIADVF

SEQ ID NO: 72133 - protein, 369 aa, Aspergillus niger
KPILLSALASLASASPLLYSRTTNETFVFTNANGLNFIQMNTTLPNVTIFATGGTIAGSDSSPTATTGYTSGAVGVLSLIDAVPSMLDVANVAGVQVANVGSEDITSDILISMSKKLNRVVCEDPTMAGAVITHGTDTLEETAFFLDATVNCGKPIVIVGAMRPSTAISADGPFNLLEAVTVAASTSARDRGAMVVMNDRIASAYYVTKTNANTMDTFKAMEMGYLGEMISNTPFFFYPPVKPTGKVAFDITNVTEIPRVDILFSYEDMHNDTLYNAISSGAQGIVIAGAGAGGVTTSFNEAIEDVINRLEIPVVQSMRTVNGEVPLSDVSSDTATHIASGYLNPQKSRILLGLLLSQGKNITEIADMF

SEQ ID NO: 72134 - protein, 354 aa, ASPERGILLUS NIDULANS FGSC A4
SPVLYTREDTTSNTTYAFTNSNGLNFTQMNTTLPNVTIFATGGTIAGSAASNTATTGYQAGALGIQTLIDAVPEMLSVANIAGVQISNVGSPDVTSTILLEMAHRLNKVVCEDPSMAGAVVTHGTDTLEETAFFLDATVNCGKPIVIVGAMRPATAISADGPYNLLQAVTVASTKEARNRGAMVVMNDRIASAYYVSKTNANTMDTFKAVEMGYLGAIISNTPFFYYPAVQPSGKTTVDVSNVTSIPRVDILYSFQDMTNDTLYSSIENGAKGVVIAGSGAGSVDTAFSTAIDDIISNQGVPIVQSTRTGNGEVPYSAEGGISSGFLNPAKSRILLGLLLAQGGKGTEEIRAVF

SEQ ID NO: 72135 - protein, 369 aa, Aspergillus niger
KPILLSALASLASASPLLYSRTTNETFVFTNANGLNFIQMNTTLPNVTIFATGGTIAGSDSSPTATTGYTSGAVGVLSLIDAVPVMLDVANVAGVQVANVGSEDITSDILISMSKKLNRVVCEDPTMAGAVITHGTDTLEETAFFLDATVNCGKPIVIVGAMRPSTAISADGPFNLLEAVTVAASTSARDRGAMVVMNDRIASAYYVTKTNANTMDTFKAMEMGYLGEMISNTPFFFYPPAKPTGKVAFDITNVTEIPCVDILFSYEDMHNDTLYNAISSGAQGIVIAGAGAGGVTTSFNEAIEDVINRLEIPVVQSMRTVNGEVPLSDVSSDTATHIASGYLNPQKSRILLGLLLSQGKNITEIADVF

SEQ ID NO: 72136 - protein, 369 aa, Aspergillus niger
KPILLSALASLASASPLLYSRTTNETFVFTNANGLNFTQMNTTLPNVTIFATGGTIAGSHSSSTATTGYTSGTFGVLSLIDAVPSMLDVANVAGVQVVNVGSEDITSDILISMSKKLNRVVCEDPTMAGAVITHGTDTLEETAFFLDATVNCGKPIVIVGAMRPSTTISADGPFNLLEAVTVAASTSARDRGAMVVMNDRIASAYYVTKTNANTMDTFKAMEMGYLGEMISNTPFFFYPPVKPTGKVAFDITNVTEIPRVDILFSYEDMHNDTLYNAISSGAQGIVIAGAGAGGVTTSFNEAIEDVINRLEIPVVQSMRTVNGEVPLSDVSSDTATHIASGYLNPQKSRILLGLLLSQGKNITEIADVF

SEQ ID NO: 72137 - protein, 354 aa, Unidentified
SPVLYTREDTTSNTTYAFTNSNGLNFTQMNTTLPNVTIFATGGTIAGSAASNTATTGYQAGALGIQTLIDAVPEMLSVANIAGVQISNVGSPDVTSTILLEMAHRLNKVVCEDPSMAGAVVTHGTDTLEETAFFLDATVNCGKPIVIVGAMRPATFISADGPYNLLQAVTVASTKEARNRGAMVVMNDRIASAYYVSKTNANTMDTFKAVEMGYLGAIISNTPFFYYPAVQPSGKTTVDVSNVTSIPRVDILYSFQDMTNDTLYSSIENGAKGVVIAGSGAGSVDTAFSTAIDDIISNQGVPIVQSTRTGNGEVPYSAEGGISSGFLNPAKSRILLGLLLAQGGKGTEEIRAVF

SEQ ID NO: 72138 - protein, 369 aa, Aspergillus niger
KPILLSALASLASASPLLYSRTTNETFVFTNANGLNFTQMNTTLPNVTIFATGGTIAGSHSSSTATTGYTSGTFGVLSLIDAVPSMLDVANVAGVQVVNVGSEDITSGILISMSKKLNRVVCEDPTMAGAVITHGTDTLEETAFFLDATVNCGKPIVLVGAMRPSTTISADGPFNLLEAVTVAASTSARDRGAMVVMNDRIASAYYVTKTNANTMDTFKAMEMGYLGEMISNTPFFFYPPAKPTGKVAFDITNVTEIPRVDILFSYEDMHNDTLYNAISSGAQGIVIAGAGAGGVTTSFNEAIEDVINRLEIPVVQSMRTVNGEVPLSDVSSDTATHIASGYLNPQKSRILLGLLLSQGKNITEIADMF

SEQ ID NO: 72139 - protein, 371 aa, Aspergillus fumigatus
LSFKIITLAAMIAVGNASPFVYPRATSPNSTYVFTNSHGLNFTQMNTTLPNVTILATGGTIAGSSNDNTATTGYTAGAIGIQQLMDAVPEMLDVANVAGIQVANVGSPDVTSSLLLHMARTINEVVCDDPTMSGAVITHGTDTLEETAFFLDATVNCGKPIVVVGAMRPATAISADGPFNLLQAVTVAAHPTARNRGALVVMNDRIVSAYYVSKTNANTMDTFKAVEMGNLGAIISNKPYFFYPPVMPTGKTTFDVRNVASIPRVDILYSYQDMQNDTLYDAVDNGAKGIVVRSVSSGYYDAIDDIASTHSLPVVLSTRTGNGEVAITDSETTIESGFLNPQKARILLGLLLAEDKGFKEIKEAFAKNGVA

SEQ ID NO: 72140 - protein, 349 aa, Aspergillus fumigatus
SPFVYPRATSPNSTYVFTNSHGLNFTQMNTTLPNVTILATGGTIAGSSNDNTATTGYTAGAIGIQQLMDAVPEMLDVANVAGIQVANVGSPDVTSSLLLHMARTINEVVCDDPTMSGAVITHGTDTLEETAFFLDATVNCGKPIVVVGAMRPATAISADGPFNLLQAVTVAAHPTARNRGALVVMNDRIVSAYYVSKTNANTMDTFKAVEMGNLGAIISNKPYFFYPPVMPTGKTTFDVRNVASIPRVDILYSYQDMQNDTLYDAVDNGAKGIVVRSVSSGYYDAIDDIASTHSLPVVLSTRTGNGEVAITDSETTIESGFLNPQKARILLGLLLAEDKGFKEIKEAFA

SEQ ID NO: 72141 - protein, 351 aa, Aspergillus terreus
SPLYSRADANVTYVFTNAHGLNFTQMNTTLPNVTILATGGTIAGSSADNTATTGYKAGAIGIQQLIDAVPEMLNVANVAGVQVTNVGSPDVTSHILLDMVRMLDELVCQDETMAGAVITHGTDTLEETAFFLDATMPCRKPVVVVGAMRPSTAISADGPFNLLQSVTVAATPAARDRGALVVLNDRVLSAFYTSKTNANTMDTFKAIEMGALAAIVSNKPYFYYPPVRPTGHEFFDVRNVSALPRVDILYSYQDMQNDTLYDAAKNGAKGIVIAGSGAGSVSSGFSAAIEDVMDTYHIPVVASTRTGNGEVPPSDDGAIGSGFLNPQKSRIWLELLLMQKKTVAEVREMFA

SEQ ID NO: 72142 - protein, 494 aa, Bacillus licheniformis; identical to SEQ ID NO: 91

SEQ ID NO: 72143 - protein, 431 aa, Bacillus licheniformis DSM 13 = ATCC 14580
KTDERKKTERWRLDTSDGKQFKIRNMDSGKIIIPAHYALSDNNPAVLYYDNSRKEELWNIIGADKDGNGDFITYKIVSAQNNSLALTLDGSGVKLAKYTGSSVQKWKLPSDGLEGFAGYAKETNGKQKTGTTGGLLGKVVYVNNLGELKANIEDSTPRTIVVSSNIGASAKTVLTVGANKTIIGSYEKHKLNNIYFKTKADSGNVIFKNLVIAHDASINENNDIPVYITDSRNYWIDHVTFQGHSYTANGHDLDKLLYVGAKADYVTLSHSTFTDHRYGLILGWPQDDKQYHSIYNGYPRMTISHSRFENLYVRAPGLMRYGYYHVKNNYINNYHLGFTITTLAKIYSEANYFGTGNEKGILDDYGDGAFKDVGSYPAIKGQKSPETSWTPSSNYSYRTMKAGNAKAFAKRYAGAQRTALYYANYSQFKKD

SEQ ID NO: 72144 - protein, 337 aa, Alkalihalobacillus bogoriensis
MKQQKRLYARLLTLLFALIFLLPHSAAAANSGFYVSGTTLYDANGNPFVMRGINHGHTWYKDQATTAIEGIANTGANTVRIVLSDGGQWTKDDIHTVRNLISLAEDNHLVAVLEVHDATGQDDIASLNRAVDYWIEMRSALIGKEKTVIINIANEWFGSWEGDPWARGYKQAIPRLRNAGLNHTLMVDAAGWGQFPQSIHDYGREVFNADPQRNTMFSIHMYEYAGGTARQVRTNIDGVLNQDLALVIGEFGHRHTNGDVDEATIMSYSEQRGVGWLAWSWKGNGPEFEYLDLSNDWAGNNLTAWGNTIVHGPYGIRETSRPVTVFTGGGSDGGTSP

SEQ ID NO: 72145 - DNA, 10009 bp, Alkalihalobacillus bogoriensis
  source 1..10009: mol_type = unassigned DNA
gagtatcgccagtaaggggcgtttttgttttctggttgttttcttcatttcaggtttcgccctttccttgccaaatataagaaaaacggcgttccgataatcgcggtgacaatgccgaccggtgattcataaggaaatgcaatccatctggccagaacatctgcgtacaccagcaaaatggcaccgaacagtgccgaaaacggaagcacgtattgataatgttctccgatcagcttgcggacaatatgcgggacgagcagcccgacaaagccaatcggcccggcgacggctacggaagcgccggaaagaattaaaataatcaaactgatcagaatcctgatgccgttcatattttgtccaagcccttttgctgtttcgtctccgagaccgagaacagaaacagaaccggaaaatacgagggcaagcccgatgccaatgacagaaaaaggagcgatggttatgacgtcctgccagttgctgccgtcgattgcgcctgtcatccagtacagaacatcctcacctgactcatttaaaataatgatggcctgtgtcatagaggagaggaacaagtgcacggccattcctgacagcgccagcttgacaggcgtcattccgccggatgaggcaatcatatacacaatcgcgccgcctgctgccgcacccgcaaaagcgaatataacagatgaatagggcgatgccggcagaatgacgagagaagcaacaacaaaaagcgatgcacccgcattcacaccgaaaatttggggtgaagccagaggatttctggtcatagcctgcatcagcgcccctgctacagctaggctggcgccgacaaaaacgccgattaatgtgcggggaaggcgaagagtagagatgatgagctgttcctttgaaccgtcccatacaaaaagatatttcaatgaatctatgatgctgatgtctgaggctcctactgaaagattcagcccaagcccaaatataaaaataatcagtgcaatgataaacatcatcagtcttgatgatgagcgccgtttggctgaatgatacaacagtctcacttccttactgcgtctggttgcaaaaacgaagaagcaaggattcccctcgcttctcatttgtcctatttattatacacttttttaagcacatctttggcgcttgtttcactagacttgatgcctctgaatcttgtccaagtgtcacggtccgcatcatagacttgtccatttttcaccgctttgagatttttccagagcgggttcgttttccactcatctacaatggttttgccttcgttggctgagatgaacaaaatatcaggatcgattttgctcaattgctcaaggctgacctcttgataggcgttatctgacttcacagcgtgtgtaaagcctagcattttaaagatttctccgtcataggatgatgatgtatgaagctggaaggaatccgctcttgcaacgccgagaacgatgttgcggttttcatctttcggaagttcggcttttagatcgttgatgacttttttgtgctcggcaagcttttcttttccttcatcttctttatttaatgctttagcaatggtcgtaaagctgtcgatcgtttcgtcatatgtcgcttcacggctttttaattcaatcgtcggggcgatttttttcagctgtttataaatgtttttatggcgctcagcgtcagcgatgattaaatcaggcttcaaggaactgatgacctcaagattgggttcgctgcgtgtgcctacagatgtgtaatcaatggagctgccgacaagctttttaatcatatcttttttgttgtcatctgcgatgcccaccggcgtaatgccgagattgtgaacggcatccaagaatgaaagctcaagcacaaccacccgcttaggtgtgccgcttactgtcgtttttccttcttcgtcatggatcactctggaatccttagactcgcttttgccgcttccgttgttattctggcttgatgaacagccggatacaatgaggcaggcgagcaataaaacactcatgatggcaatcaacttgttagaataggtgcgcatgtcattcttccttttttcagatttagtaatgagaatcattatcacatgtaacactataatagcatggcttatcatgtcaatatttttttagtaaagaaagctgcgtttttactgctttctcatgaaagcatcatcagacacaaataagtggtatgcagcgttaccgtgtcttcgagacaaaaacgcatgggcgttggctttagaggtttcgaacatatcagcagtgacataaggaaggagagtgctgagataaccggacaatttcttttctatttcatctgttagtgcaaattcaatgtcgccgatattcatgataatcgagaaaacaaagtcgatatcgatatgaaaatgttcctcggcaaaaaccgcaagctcgtgaattcctggtgaacatccggcacgcttatggaaaatctgtttgactaaatcactcacaatccaagcattgtattgctgttctggtgaaaagtattgcattagacatacctcctgctcgtacggataaaggcagcgtttcatggtcgtgtgctccgtgcagcggcttctccttaattttgatttttctgaaaataggtcccgttcctatcactttaccatggacggaaaacaaatagctactaccattcctcctgtttttctcttcaatgttctggaatctgtttcaggtacagacgatcgggtatgaaagaaatatagaaaacatgaaggaggaatatcgacatgaaaccagttgtaaaagagtatacaaatgacgaacagctcatgaaagatgtagaggaattgcagaaaatgggtgttgcgaaagaggatgtatacgtcttagctcacgacgatgacagaacggaacgcctggctgacaacacgaacgccaacacgatcggagccaaagaaacaggtttcaagcacgcggtgggaaatatcttcaataaaaaaggagacgagctccgcaataaaattcacgaaatcggtttttctgaagatgaagccgctcaatttgaaaaacgcttagatgaaggaaaagtgcttctctttgtgacagataacgaaaaagtgaaagcttgggcataaagcaaggaaaaaaccaaaaggccaatgtcggccttttggtttttttgcggtctttgcggtgggattttgcagaatgccgcaataggatagcggaacattttcggttctgaatgtccctcaatttgctattatatttttgtgataaattggaataaaatctcacaaaatagaaaatgggggtacatagtggatgaaaaaagtgatgttagctacggctttgtttttaggattgactccagctggcgcgaacgcagctgatttaggccaccagacgttgggatccaatgatggctggggcgcgtactcgaccggcacgacaggcggatcaaaagcatcctcctcaaatgtgtataccgtcagcaacagaaaccagcttgtctcggcattagggaaggaaacgaacacaacgccaaaaatcatttatatcaagggaacgattgacatgaacgtggatgacaatctgaagccgcttggcctaaatgactataaagatccggagtatgatttggacaaatatttgaaagcctatgatcctagcacatggggcaaaaaagagccgtcgggaacacaagaagaagcgagagcacgctctcagaaaaaccaaaaagcacgggtcatggtggatatccctgcaaacacgacgatcgtcggttcagggactaacgctaaagtcgtgggaggaaacttccaaatcaagagtgataacgtcattattcgcaacattgaattccaggatgcctatgactattttccgcaatggttgtaaaacgacggccagtgaattctgatcaaatggttcagtgagagcgaagcgaacacttgattttttaattttctatcttttataggtcattagagtatacttatttgtcctataaactatttagcagcataatagatttattgaataggtcatttaagttgagcatattagaggaggaaaatcttggagaaatatttgaagaacccgaggatctagatcaggtaccgcaacgttcgcagatgctgctgaagagattattaaaaagctgaaagcaaaaggctatcaattggtaactgtatctcagcttgaagaagtgaagaagcagagaggctattgaataaatgagtagaaagcgccatatcggcgcttttcttttggaagaaaatatagggaaaatggtacttgttaaaaattcggaatatttatacaatatcatatgtatcacattgaaaggaggggcctgctgtccagactgtccgctgtgtaaaaaaaaggaataaaggggggttgacattattttactgatatgtataatataatttgtataagaaaatggaggggccctcgaaacgtaagatgaaaccttagataaaagtgctttttttgttgcaattgaagaattattaatgttaagcttaattaaagataatatctttgaattgtaacgcccctcaaaagtaagaactacaaaaaaagaatacgttatatagaaatatgtttgaaccttcttcagattacaaatatattcggacggactctacctcaaatgcttatctaactatagaatgacatacaagcacaaccttgaaaatttgaaaatataactaccaatgaacttgttcatgtgaattatcgctgtatttaattttctcaattcaatatataatatgccaatacattgttacaagtagaaattaagacacccttgatagccttactatacctaacatgatgtagtattaaatgaatatgtaaatatatttatgataagaagcgacttatttataatcattacatatttttctattggaatgattaagattccaatagaatagtgtataaattatttatcttgaaaggagggatgcctaaaaacgaagaacattaaaaacatatatttgcaccgtctaatggatttatgaaaaatcattttatcagtttgaaaattatgtattatggagctctgaaaaaaaggagaggataaagaatgaaacaacaaaaacggctttacgcccgattgctgacgctgttatttgcgctcatcttcttgctgcctcattctgcagccgcggcaaattccggattttatgtaagcggtaccactctatacgatgccaatggaaacccatttgtaatgagagggattaaccatgggcacacatggtataaagaccaggcaactactgcaattgaagggattgcaaataccggtgctaatacggtccggattgtgttatctgatgggggacaatggacaaaagatgacatccatacagtaagaaaccttatctctttagcggaagataatcatttggttgctgttcttgaagttcatgatgctaccggtcaagatgatattgcttcgctcaatcgtgctgttgattattggattgaaatgagaagtgctttaattggaaaggaaaaaaccgtcattattaatattgcgaatgaatggtttggttcgtgggaaggggatccatgggctagagggtataaacaagcaatcccgcgattgcgtaacgccggtctaaaccataccttgatggtagatgctgcggggtggggacaatttccacaatcgattcatgattatggaagagaagtttttaatgctgaccctcaacgaaatacaatgttttcgattcatatgtatgaatatgcaggtggtacagcaagacaagttcgtactaatattgacggagttcttaatcaagacctcgcattagtcattggtgaatttggacaccgtcatacaaatggtgacgtcgatgaagcaacgattatgagctattctgaacaaagaggagttgggtggttggcgtggtcatggaaagggaacggcccagaatttgagtatttagacctttcgaatgattgggctggaaataaccttacagcttggggaaatacaatagtgcatggtccatatggtattagagaaacttcgagaccagttaccgtttttacaggtggaggatctgatggaggaacttctccgtaatcgcatgttcaatccgctccataatcggtcgacgcggcggttcgcgtccggacagcacatcaccgaaatatttcgacggcccagccggctagcgcgttaatccgcggatatatagcggccgcagatctgggaccaataataatgactagagaagaaagaatgaagattgttcatgaaattaaggaacgaatattggataaagtgggatatttttaaaatatatatttatgttacagtaatattgacttttaaaaaaggattgattctaatgaagaaagcagacaagtaagcctcctaaattcactttagataaaaatttaggaggcatatcaaatgaactttaataaaattgatttagacaattggaagagaaaagagatatttaatcattatttgaaccaacaaacgacttttagtataaccacagaaattgatattagtgttttataccgaaacataaaacaagaaggatataaattttaccctgcatttattttcttagtgacaagggtgataaactcaaatacagcttttagaactggttacaatagcgacggagagttaggttattgggataagttagagccactttatacaatttttgatggtgtatctaaaacattctctggtatttggactcctgtaaagaatgacttcaaagagttttatgatttatacctttctgatgtagagaaatataatggttcggggaaattgtttcccaaaacacctatacctgaaaatgctttttctctttctattattccatggacttcatttactgggtttaacttaaatatcaataataatagtaattaccttctacccattattacagcaggaaaattcattaataaaggtaattcaatatatttaccgctatctttacaggtacatcattctgtttgtgatggttatcatgcaggattgtttatgaactctattcaggaattgtcagataggcctaatgactggcttttatatgagataatgccgactgtactttttacagtcggttttctaacgatacattaataggtacgaaaaagcaactttttttgcgcttaaaaccagtcataccaataacttaagggtaactagcctcgccggaaagagcgaaaatgcctcacatttgtgccacctaaaaaggagcgatttacatatgagttatgcagtttgtagaatgcaaaaagtgaaatcagctggactaaaaggggccgcagagtagaatggaaaaggggatcggaaaacaagtatataggaggagacctatttatggcttcagaaaaagacgcaggaaaacagtcagcagtaaagcttgttccattgcttattactgtcgctgtgggactaatcatctggtttattcccgctccgtccggacttgaacctaaagcttggcatttgtttgcgatttttgtcgcaacaattatcggctttatctccaagcccttgccaatgggtgcaattgcaatttttgcattggcggttactgcactaactggaacactatcaattgaggatacattaagcggattcgggaataagaccatttggcttatcgttatcgcattctttatttcccggggatttatcaaaaccggtctcggtgcgagaatttcgtatgtattcgttcagaaattcggaaaaaaaacccttggactttcttattcactgctattcagtgatttaatactttcacctgctattccaagtaatacggcgcgtgcaggaggcattatatttcctattatcagatcattatccgaaacattcggatcaagcccggcaaatggaacagagagaaaaatcggtgcattcttattaaaaaccggttttcaggggaatctgatcacatctgctatgttcctgacagcgatggcggcgaacccgctgattgccaagctggcccatgatgtcgcaggggtggacttaacatggacaagctgggcaattgccgcgattgtaccgggacttgtaagcttaatcatcacgccgcttgtgatttacaaactgtatccgccggaaatcaaagaaacaccggatgcggcgaaaatcgcaacagaaaaactgaaagaaatgggaccgttcaaaaaatcggagctttccatggttatcgtgtttcttttggtgcttgtgctgtggatttttggcggcagcttcaacatcgacgctaccacaaccgcattgatcggtttggccgttctcttattatcacaagttctgacttgggatgatatcaagaaagaacagggcgcttgggatacgctcacttggtttgcggcgcttgtcatgctcgccaacttcttgaatgaattaggcatggtgtcttggttcagtaatgccatgaaatcatccgtatcagggttctcttggattgtggcattcatcattttaattgttgtgtattattactctcactatttctttgcaagtgcgacagcccacatcagtgcgatgtattcagcatttttggctgtcgtcgtggcagcgggcgcaccgccgcttttagcagcgctgagcctcgcgttcatcagcaacctgttcgggtcaacgactcactacggttctggagcggctccggtcttcttcggagcaggctacatcccgcaaggcaaatggtggtccatcggatttatcctgtcgattgttcatatcatcgtatggcttgtgatcggcggattatggtggaaagtactaggaatatggtagaaagaaaaaggcagacgcggtctgcctttttttattttcactccttcgtaagaaaatggattttgaaaaatgagaaaattccctgtgaaaaatggtatgatctaggtagaaaggacggctggtgctgtggtgaaaaagcggttccatttttccctgcaaacaaaaataatggggctgattgcggctctgctggtctttgtcattggtgtgctgaccattacgttagccgttcagcatacacagggagaacggagacaggcagagcagctggcggttcaaacggcgagaaccatttcctatatgccgccggttaaagagctcattgagagaaaagacggacatgcggctcagacgcaagaggtcattgaacaaatgaaagaacagactggtgcgtttgccatttatgttttgaacgaaaaaggagacattcgcagcgcctctggaaaaagcggattaaagaaactggagcgcagcagagaaattttgtttggcggttcgcatgtttctgaaacaaaagcggatggacgaagagtgatcagagggagcgcgccgattataaaagaacagaagggatacagccaagtgatcggcagcgtgtctgttgattttctgcaaacggagacagagcaaagcatcaaaaagcatttgagaaatttgagtgtgattgctgtgcttgtactgctgctcggatttattggcgccgccgtgctggcgaaaagcatcagaaaggatacgctcgggcttgaaccgcatgagatcgcggctctatatcgtgagaggaacgcaatgcttttcgcgattcgagaagggattattgccaccaatcgtgaaggcgtcgtcaccatgatgaacgtatcggcggccgagatgctgaagctgcccgagcctgtgatccatcttcctatagatgacgtcatgccgggagcagggctgatgtctgtgcttgaaaaaggagaaatgctgccgaaccaggaagtaagcgtcaacgatcaagtgtttattatcaatacgaaagtgatgaatcaaggcgggcaggcgtatgggattgtcgtcagcttcagggagaaaacagagctgaagaagctgatcgacacattgacagaggttcgcaaatattcagaggatctcagggcgcagactcatgaattttcaaataagctttatgcgattttagggctgc

SEQ ID NO: 72146 - DNA, 2344 bp, Trichoderma harzianum
  source 1..2344: mol_type = unassigned DNA
tcacaaatgcagcccaaaaacttgaattttagtattattcctgagccgttacccgcaattactgcataaccccggctcctgaaaacgacttacacagcaaacaaggacgtaatagcctagaagctagaagaagcaactctcaaccccgaacctttccagtccaagccaccgaaggaagcccggtgctattctacaacagtaaagagataactcatgccggtacaaatcagtcggcaatgggtgtctctatctccgttgcgcaaaacacttcggcccgaaatctgtcttgagatgatgaggatcgagtacagcttcttgataatgcctcttgataatgcctctcgagatacaagtatatatagagggttattcacagataaacatgttcatcagagctcaactcattggattggttccaaaaactcaaaaggaaagaattaattcctttgcatcatcattatcactcctttccactctgaattcatacaagtccttacatcatgcggacactcactatccttactaccctcattggtgcagtagcagcggccccttctctcattccaagagtatcacccttttccattgccaagcctggaggtgttgacgacatcgttatcacggcaaacaacactctcaacggaacctatcatagttcaacaacagtctccaaaaatgtcatccagactcgagctcaggctggacacctgcccatccaactcgtcaacaacttctccggtagtcaggtcaatgcatacatttccggcctggacactgacaacagggtcgtttttgtcaggggtgacggcagtcttgtgtatcccagctctggaggctccagtgtccctgttgcgatcagcacccccatcaacattgcgttgcctgctcaaggccagtccatcacggtgaatgtgcctattgtcatcagctctgcgcgtatctacttttcagtgggcgatctccagttcttcatggtcaagattcccaacggcgatggcttggtgcaaccgtcccagttcaaccttcaagacccgagtgcaggcctcctctggggctttgttgagctcacctatactacggacctggctgtctacgcaaacatcagctacgtcgactttgtcggtatgattctcagtatgagcttgagtgccacggatggaagcgccactcagaccacgaaaggccttggatcttccgcactcacccagatttgccagggcttggtccaacaagctagcgtcgacggcttcccctggtcttcgatgtgtatcgccaattctgctggaactctcgttcgtgcgctgtctccaggcgactacagtgtgatcaatgcagcggccttccagaactactggagtgcctatgtcgaccaagtctggagccagtatactaacactcctctcaccatcaacacacaaacctctgctggcagcgtcaactgccaggtctccggcgacacgctgaactgcaacggcgacaaccgcggctacgctaagccggctgcaggagacatctggggctgcaacagtggaccatttgccattcagagcggtgacaatgccgtccattcggctgttgttccccgtctgtgtgctgcctttgtgcgatctaccttgttgcttgctggtggcaacgttcagccaggcctgggccagtcttcatactacacagtcagccctaccaaccactacagccgtcttgttcaccaatttgaaattgatggtcgaggctacgctttcccatatgatgatgtcaacccagatggtaatgagaatgcctcgggcactttggcttcaggggctcccaatgttctgactgtctacgtcggcgctcctccttcataaatcaggctaaaacctcttcactgtacatataaaatgagtgacgaaaggatttggtactcttaaaagttcttggaccattcttgaacataaaccatgtatatagcagtatagttttacctaaatatataccaacaacgattgctgtcttacttcggctgctcgcaaatgtgaatggagagagtgaagagatcattctttttttatatatacgctgccatcatgtgccttcaatgtcatcaccgggtaagtcggaaccagttgtgaccctcgaaccatgtcggcacggcatattctgacaggggggttgcaaaaggaagtcgatcggcgccttggtccacctcaacacaacaaaagcagccaggccaggtaatcaaggacaaatccactctgctcaccgagtacagtagacaggggactggttttgacatttcggcttgtcacattagtggagagataagaggtaaaacgtccctgtaaaccgggatgagtatcaacctaca

SEQ ID NO: 72147 - protein, 247 aa, Fusarium longipes
MKPTQVLLALAAIAYAAPVAEDTKVEAVEFDDDFPLAELEAYFENHLNGQASESGSLQARQFSSSTYNQLTDGTPCRPVTMIYARGTTQAGNVGDPAAVGPVLFNNLASRIGLNNLAVQGVTYPANVAGFLAGGDAAGSRTMATLISRAASQCPSTKIIISGYSQGAQLVHNAAGMLSASVANRVTAAVTFGDPKQNEAFGTIPSSRTRVYCRSGDNICTGGIIITPAHSQYQQDAPAAAQWIAARV

SEQ ID NO: 72148 - DNA, 1063 bp, Fusarium longipes
  source 1..1063: mol_type = unassigned DNA
ataagaagctgggcatgtcatctgttggctatctgctctcgactaccaagccaagccaagccagaccaacaatagcctgttctcaccacacttcttgaccatgaagcccactcaagtcctgctcgctctggcagctatcgcctatgccgcccccgtggcagaagataccaaggtcgaggctgtagagtttgacgatgacttccctctcgccgaactcgaagcatactttgagaaccacctgaacggccaagcttccgagagcggctctctccaggccagacagtttagctctagcacctacaatcaactgacagatgggacaccttgccgtcctgtcacaatgatttatgctcgaggaactacccaagctggcaatgttggagacccggccgccgttgggcccgttctattcaacaaccttgcctctcgcattggcttgaacaacctagctgtgcagggtgtcacttatcccgcaaatgttgctggatttcttgccggaggtgacgctgccggaagtagaactatggctactctaatttccagggtatgtctacaagagaataaatcataccaacattgaatccagatactgacaaaagaataaactataggccgccagtcagtgccccagcaccaaaatcatcatcagtggctacagtcaaggtgcccagctcgtgcacaacgctgccggtatgctgtctgcgtccgttgccaaccgagtcactgctggttagtacttgtactctttatctgagactccttaactaatgcgatatatgtacagctgtgacctttggtgaccccaagcagaacgaggctttcggaaccatcccctcatcccgcactcgcgtctactgccgctcgggagacaacatttgcactggtggcattattattacccccgcacacagccagtaccagcaagatgctcctgctgctgctcaatggattgctgctcgcgtttaagtcttggatggagttgcttaagcttgagtgtcatttgcttgtctagatattatacatacttggatagatagactgtgatgataggaaattgaattat

SEQ ID NO: 72149 - protein, 217 aa, Colletotrichum graminicola
MHRSTPALLLAVLGMASASPFAIVPRQADFSGNQQDGLSGPCQPTMVIFARGTTERGNVGTLAGPPFFQALSAQVGGALAVQGVEYPASVQGFLAGGDAKGSQTMATLTEQAITKCPNSSIIMSGYSQGGQLVHNAAAMMSQSMVASVAGAVIFGDPLNGQPVQGVPTQRTMVICHNGDNICEGGSQIRRAHLTYGDNAAEAAQFAASMTPPSAAAA

SEQ ID NO: 72150 - DNA, 1307 bp, Colletotrichum graminicola
  source 1..1307: mol_type = unassigned DNA
tgaagctttgttggcccaaggttcggtttaccaaagtcactacgccccagctcagcctatctatacagatataataaccccgcctgggggactgaataagatgcaccgatcaacaccggccctcctcctcgccgtgctgggcatggcgtccgcctcccccttcgcgatcgtgccccgacaggccgacttctcggggaaccagcaggacggcctctcgggcccctgccagcccacgatggtcatcttcgcccgcggaaccaccgagcgcggcaacgtcggcaccctcgccggcccgccattcttccaggccctgtcggcccaggtcggtggcgccctcgccgtccagggcgtcgagtaccccgccagcgtccaaggcttcctcgccggcggcgacgccaagggctcccagacaatggccaccctcaccgagcaggccatcacaaagtgccccaactcgtccatcatcatgtccggctattcccagggcggccagctggtgcacaacgccgcggcgatgatgtcccagtccatggtggccagcgtcgctggtgccgtcatctttggcgacccacgtaagccctttcttccctttccccggatgagacttgaagttgacccctctccccagtcaatggccagcccgtccagggcgtccccacccaaaggaccatggtcatctgccacaacggcgacaacatctgtgagggcggcagccagatccgccgcgcccacttgacgtacggcgacaacgccgccgaggccgcccagttcgccgcgtccatgacgccgccgtctgccgccgcggcgtaaggggaaccccgggagccttctcagagttgacctcggaggaggcagttccattgtgtgtacatatttcggtattttacttttttgcgcgaagacgtacgcccaaggtcgcgccgtgtagcacgtggtgaaacggactgaaggggtaatgccgacgagccaggtctacttttggccgtgagggggagggttgccagtaatcttcgtcgtttggcatagctttagaatttgcgtcgccatttcctcagacatagacgcgatctcttagtgtgaatgataccggctgctcttttgagaaaaaaaaaaacaaaaacaaaggcggtgggggtttcaatcgttgccccgggcaagaccagatggctcgtatgaactctgctgcggtaccatcacttttcgatgcttcaagtgacacgatggatcttcatcccgcctattctccatgcgcggcttggcggactggcgtgcaattcagctgtgtccatggtcggatggctttcagt
